(19) United States
(12) Patent Application Publication
(10) Pub. No.: US 2011/0154531 A1
(43) Pub. Date: Jun. 23, 2011

(54) Yield Increase in Plants Overexpressing the MTP Genes

(75) Inventors: Rodrigo Sarria-Millan, Durham, NC (US); Eric R. Garr, Holly Springs, NC (US); Jamie Haertel, Durham, NC (US); Damian Allen, Cary, NC (US); Bryan Mckersie, Raleigh, NC (US)

(73) Assignee: BASF Plant Science GmbH, Ludwigshafen (DE)

(21) Appl. No.: 11/988,792

(22) PCT Filed: Jul. 13, 2006
(86) PCT No.: PCT/US2006/027472

§ 371 Date: Jan. 14, 2008

Related U.S. Application Data
(60) Provisional application No. 60/700,562, filed on Jul. 19, 2005.

(51) Int. Cl. A01H 5/00; A01H 5/10; C12N 5/10; A01H 1/00

(52) U.S. Cl. 800/278; 800/298; 800/320.1; 800/320.3; 800/320; 800/320.2; 800/312; 800/314; 800/317.1; 800/322; 800/317; 800/317.2; 800/317.3; 800/317.4; 435/419

(57) ABSTRACT

A transgenic crop plant transformed by a Membrane Transporter-like Polypeptide (MTP) coding nucleic acid, wherein expression of the nucleic acid sequence in the crop plant results in the plant's increased root growth, and/or increased yield, and/or increased tolerance to environmental stress as compared to a wild type variety of the plant. Also provided are agricultural products, including seeds, produced by the transgenic crop plants.

### CROSS REFERENCE TO RELATED APPLICATIONS

[0001] This application claims the priority benefit of U.S. Provisional Application Ser. No. 60/700,562 filed Jul. 19, 2005, the entire content of which is hereby incorporated by reference.

### BACKGROUND OF THE INVENTION

[0002] 1. Field of the Invention

[0003] This invention relates generally to nucleic acid sequences encoding polypeptides that are associated with root development, which contribute to plant growth and, ultimately affect plant production (i.e. yield) under abiotic stress or non-stress conditions. In particular, this invention relates to isolated nucleic acid sequences encoding polypeptides that confer upon the plant increased root growth, increased yield, and/or increased drought, cold, and/or salt tolerance, and the use of such isolated nucleic acids.

[0004] 2. Background Art

[0005] The yield of crop plants is central to the well being of humans and is directly affected by the growth of plants under physical environment. Abiotic environmental stresses, such as drought stress, salinity stress, heat stress, and cold stress, are major limiting factors of plant growth and productivity. Crop losses and crop yield losses of major crops such as soybean, rice, maize (corn), cotton, and wheat caused by these stresses represent a significant economic and political factor and contribute to food shortages in many underdeveloped countries.

[0006] Plant biomass is the total yield for forage crops like alfalfa, silage corn and hay. Many proxies for yield have been used in grain crops. Chief amongst these are estimates of plant size. Plant size can be measured in many ways depending on species and developmental stage, but include total plant dry weight, above-ground dry weight, above-ground fresh weight, leaf area, stem volume, plant height, rosette diameter, leaf length, root length, root mass, tiller number and leaf number. Many species maintain a conservative ratio between the size of different parts of the plant at a given developmental stage. These allometric relationships are used to extrapolate from one of these measures of size to another. Plant size at an early developmental stage will typically correlate with plant size later in development. A larger plant with a greater leaf area can typically absorb more light and carbon dioxide than a smaller plant and therefore will likely gain a greater weight during the same period. This is in addition to the potential continuation of the micro-environmental or genetic advantage that the plant had to achieve the larger size initially. There is a strong genetic component to plant size and growth rate, and so for a range of diverse genotypes plant size under one environmental condition is likely to correlate with size under another. In this way a standard environment is used as a proxy for the diverse and dynamic environments encountered at different locations and times by crops in the field.

[0007] Harvest index, the ratio of seed yield to above-ground dry weight, is relatively stable under many environmental conditions and so a robust correlation between plant size and grain yield can often be obtained. These processes are intrinsically linked because the majority of grain biomass is dependent on current or stored photosynthetic productivity by the leaves and stem of the plant. Therefore, selecting for plant size, even at early stages of development, has been used as an indicator for future potential. When testing for the impact of genetic differences on stress tolerance, the ability to standardize soil properties, temperature, water and nutrient availability and light intensity is an intrinsic advantage of greenhouse or plant growth chamber environments compared to the field. However, artificial limitations on yield due to poor pollination due to the absence of wind or insects, or insufficient space for mature root or canopy growth, can restrict the use of these controlled environments for testing yield differences. Therefore, measurements of plant size in early development, under standardized conditions in a growth chamber or greenhouse, are standard practices to provide indication of potential genetic yield advantages.

[0008] During the life cycle, plants are typically exposed to conditions of reduced environmental water content. Most plants have evolved strategies to protect themselves against these conditions of desiccation. However, if the severity and duration of the drought conditions are too great, the effects on development, growth, plant size, and yield of most crop plants are profound. Continuous exposure to drought conditions causes major alterations in the plant metabolism which ultimately lead to cell death and consequently yield losses.

[0009] Developing stress-tolerant plants is therefore a strategy that has the potential to solve or mediate at least some of these problems. However, traditional plant breeding strategies to develop new lines of plants that exhibit resistance and/or tolerance to these types of stresses are relatively slow and require specific resistant lines for crossing with the desired line. Limited germplasm resources for stress tolerance and incompatibility in crosses between distantly related plant species represent significant problems encountered in conventional breeding. Additionally, the cellular processes leading to drought, cold, and salt tolerance in model drought-, cold- and/or salt-tolerant plants are complex in nature and involve multiple mechanisms of cellular adaptation and numerous metabolic pathways. This multi-component nature of stress tolerance has not only made breeding for tolerance largely unsuccessful, but has also limited the ability to genetically engineer stress tolerant plants using biotechnological methods.

[0010] Therefore, what is needed is the identification of the genes and proteins involved in these multi-component processes leading to increased growth and/or increased stress tolerance. Elucidating the function of genes expressed in stress tolerant plants will not only advance our understanding of plant adaptation and tolerance to environmental stresses, but also may provide important information for designing new strategies for crop improvement.

[0011] Roots are an important organ of higher plants. Plant root systems are fundamental to the proper growth and development of all terrestrial plant species. In addition to uptake of water and nutrients and providing physical support, roots mediate a complex but poorly understood exchange of communication between soil microbes and other plants. In agronomic systems, production is impacted by the availability of water and nutrients in the soil: root growth has a direct or indirect influence on growth and yield of aerial organs, particularly under conditions of nutrient limitation. Roots are also relevant for the production of secondary plant products, such as defense compounds and plant hormones. Establishment of proper root architecture is an important factor for the plant to effectively use the water and nutrients available in the environment and to maximize plant growth and production. In addition, under conditions of drought, roots can adapt to continue growth while at the same time producing and sending early warning signals to shoots which inhibit plant growth above ground.

[0012] Moreover, improved root growth of crop plants will also enhance competitiveness with weedy plants and will improve growth in arid areas, by increasing water accessibility and uptake. Improved root growth is also relevant for ecological purposes, such as bioremediation and prevention/arrest of soil erosion. Longer roots can alleviate not only the effects of water depletion from soil but also improve plant anchorage and standability thus reducing lodging. Also, longer roots have the ability to cover a larger volume of soil and improve nutrient uptake. Therefore, altering root biomass, and in particular increasing root length, will improve plant growth as well as increase crop yield.

[0013] Roots are also storage organs in a number of important staple crops, for example, in sugar beets, potato, manioc (cassava), yams and sweet potato (batate). Roots are also the relevant organ for consumption in a number of vegetables (e.g. carrots, radish), herbs (e.g. ginger, kukuma) and medicinal plants (e.g. ginseng). In addition, some of the secondary plant products found in roots are of economic importance for the chemical and pharmaceutical industry, for instance, the basic molecules for the synthesis of steroid hormones is found in yams, and the roots of Lithospermum erythrorhizon produce shikonin, which is widely used because of its anti-inflammatory, anti-tumor and wound-healing properties.

[0014] Root architecture is an area that has remained largely unexplored through classical breeding because of difficulties with assessing this trait in the field. Thus, biotechnology could have significant impact on the improvement of this trait.

[0015] The structure of root systems results from a combination of genetic predisposition and physical environment. Several root mutants have been isolated from the model plant Arabidopsis thaliana and several crop species that have gleaned some insight into root growth and development.

[0016] The agr1 mutant of Arabidopsis was identified in a screen for plants with altered response to gravity. The mutants were insensitive to the plant growth hormones ethylene and to endogenous auxin suggesting that AtAGR1 was involved in auxin transport (Bell and Maher, 1990, Mol. Gen. Genet. 220:289-293). Eir1, wav6, and pin2 are mutations allelic to agr1. After isolation of AtAGR1 by positional cloning, it was determined that AtAGR1 is expressed only in the root and is a member of a family of plant genes with similarities to bacterial membrane transporters (Luschnig, 1998, Genes & Development 12:2175-2187). It is further determined that AtAGR1 encodes a basipetal auxin efflux carrier (Chen et al., 1998, Proc. Natl. Acad. Sci. USA 95:15112-15117). Moreover, in-situ hybridizations demonstrated that AtAGR1 expresses in the distal and central elongation zones of the root tip (Muller et al., 1998, The EMBO Journal 17:6903-6911).

[0017] Although some genes that are involved in stress responses in plants have been characterized, the characterization and cloning of plant genes that confer stress tolerance remains largely incomplete and fragmented. For example, certain studies have indicated that drought and salt stress in some plants may be due to additive gene effects, in contrast to other research that indicates specific genes are transcriptionally activated in vegetative tissue of plants under osmotic stress conditions. Although it is generally assumed that stress-induced proteins have a role in tolerance, direct evidence is still lacking, and the functions of many stress-responsive genes are unknown.

[0018] There is a need, therefore, to identify additional genes expressed in stress tolerant plants that have the capacity to confer increased root growth, and/or increased yield, and/or stress tolerance to its host plant and to other plant species. Newly generated stress tolerant plants will have many advantages, such as an increased range in which the crop plants can be cultivated by, for example, decreasing the water requirements of a plant species.

### SUMMARY OF THE INVENTION

[0019] This invention relates to isolated nucleic acids which encode polypeptides capable of modulating root growth, and/or plant growth, and/or yield, and/or stress tolerance under normal or stress conditions as compared to a wild type variety of the plant. In particular, the invention concerns the use of the isolated nucleic acids encode Membrane Transporter-like Polypeptides (MTPs) that are important for modulating a plant's root growth, yield, and/or response to an environmental stress. More particularly, overexpression of these MTP coding nucleic acids in a crop plant results in increased root growth, and/or increased yield under normal or stress conditions, and/or increased tolerance to an environmental stress.

[0020] Therefore, in a first embodiment, the invention concerns a transgenic crop plant transformed with an isolated nucleic acid, wherein the nucleic acid comprises a polynucleotide selected from the group consisting of:

[0021] a) a polynucleotide having a sequence as set forth in any of SEQ ID NOS as provided in Column No. 3 of Table 1;

[0022] b) a polynucleotide encoding a polypeptide having a sequence as set forth in any of SEQ ID NOS as provided in Column No. 4 of Table 1;

[0023] c) a polynucleotide having at least 70% sequence identity to a polynucleotide having a sequence as set forth in any of SEQ ID NOS as provided in Column No. 3 of Table 1;

[0024] d) a polynucleotide encoding a polypeptide having at least 70% sequence identity to a polypeptide having a sequence as set forth in any of SEQ ID NOS as provided in Column No. 4 of Table 1; and

[0025] e) a polynucleotide that hybridizes under stringent conditions to the complement of any of the polynucleotides of a) through d) above.

[0026] Preferably, the transgenic crop plant expresses such isolated nucleic acid, so as preferably to alter the phenotype of the plants in relation to non-transformed, wild-type plants. In particular, the transgenic crop plants will exhibit modulated root growth (preferably, increased root growth), and/or plant growth, and/or yield, and/or stress tolerance under normal or stress conditions as compared to a wild type variety of the plant. Preferably, the MTP is from Arabidopsis thaliana, canola, soybean, rice, sunflower, barley, wheat, linseed or maize. Namely, described herein are the Arabidopsis thaliana AtAGR1 genes (AtAGR1, AtAGR1-2, AtAGR1-3, AtAGR1-4 and AtAGR1-5), and homologs thereof in canola, soybean, rice, sunflower, barley, wheat, linseed, and maize.

[0027] In another embodiment, the invention concerns transgenic crop plants which overexpress the MTP coding nucleic acid and demonstrate an increase in root growth, and more preferably, demonstrate an increase in root length under normal or stress condition as compared to a wild type variety of the plant. In yet another embodiment, the overexpression of the MTP coding nucleic acid in the crop plant demonstrates an increased tolerance to an environmental stress as compared to a wild-type variety of the plant. In a further embodiment, the overexpression of the MTP coding nucleic acid in the crop plant demonstrates increased yield as compared to a wild-type variety of the plant. It is provided that the environmental stress can be salinity, drought, temperature, metal, chemical, pathogenic and oxidative stresses, or combinations thereof. Preferably, the environmental stress is drought stress.

[0028] In yet another embodiment, the invention concerns a seed produced by a transgenic crop plant transformed by an MTP coding nucleic acid, wherein the plant is true breeding for increased root growth, and/or increased yield, and/or increased tolerance to environmental stress as compared to a wild type variety of the plant.

[0029] In a further embodiment, the invention concerns a method of growing crop plants in an agricultural locus, wherein the method comprises obtaining the aforesaid transgenic crop plant and growing the plant in an agricultural locus.

[0030] In a still further aspect, the invention concerns product produced by or from the transgenic crop plants, their plant parts, or their seeds, such as a foodstuff; feedstuff, food supplement, feed supplement, cosmetic or pharmaceutical.

[0031] In another embodiment, the invention concerns a method of increasing root growth and/or yield, and/or increasing stress tolerance to an environmental stress of a crop plant under normal or stress condition as compared to a wild type variety of the plant, wherein the method comprises obtaining the aforesaid transgenic crop plant and growing the plant under a condition that the isolated nucleic acid is expressed.

[0032] In yet another embodiment, the invention concerns a method of producing the aforesaid transgenic crop plant, wherein the method comprises (a) transforming a plant cell with an expression vector comprising an MTP coding nucleic acid, and (b) generating from the plant cell the transgenic crop plant that expresses the encoded polypeptide. Preferably, the polynucleotide is operably linked to one or more regulatory sequences, and the expression of the polynucleotide in the plant results in increased root growth, and/or increased yield, and/or increased tolerance to environmental stress under normal or stress conditions as compared to a wild type variety of the plant. Preferably, the one or more regulatory sequences include a promoter. More preferably, the promoter is a tissue specific or developmental regulated promoter.

[0033] In a further embodiment, the invention concerns a method of identifying a novel MTP, comprising (a) raising a specific antibody response to an MTP, or fragment thereof, as described below; (b) screening putative MTP material with the antibody, wherein specific binding of the antibody to the material indicates the presence of a potentially novel MTP; and (c) identifying from the bound material a novel MTP in comparison to known MTP. Alternatively, hybridization with nucleic acid probes as described below can be used to identify novel MTP nucleic acids.

[0034] In a further embodiment, the invention also concerns methods of modifying the root growth, and/or yield, and/or stress tolerance of a plant comprising, modifying the expression of an MTP coding nucleic acid in the plant. Preferably, such modification results in increased or decreased root growth, and/or yield, and/or stress tolerance as compared to a wild type variety of the plant. Preferably, the root growth, and/or yield, and/or stress tolerance is increased in a plant via increasing expression of an MTP coding nucleic acid.

### BRIEF DESCRIPTION OF THE DRAWINGS

[0035] FIG. 1 shows the nucleotide sequence of the AtAGR1 gene (SEQ ID NO:1; At4g37580) used for Arabidopsis transformation, which is 1941 by in length.

[0036] FIG. 2 shows 647 amino acid sequence of the AtAGR1 (SEQ ID NO:2) gene used for Arabidopsis transformation.

[0037] FIG. 3 shows a schematic of the binary vector T-DNA used to transform the AtAGR1 (SEQ ID NO:1) gene. LB, left border; pAHAS, Arabidopsis AHAS promoter; 3′AHAS, AHAS termination signal; SP, Superpromoter; AtAGR1, cDNA of AtAGR1; 3′NOS, termination signal; RB, Right Border.

[0038] FIGS. 4A and 4B show a plate analysis of the Arabidopsis AtAGR1 (SEQ ID NO:1) transgenic plants. 4A demonstrates that all lines showed an increased root length phenotype. Lines 5, 7, 9, 10, and 11 showed a more significant root length increase compared to the wild type controls. 4B shows the gene level analysis of the AtAGR1 transgenic plants, confirming that AtAGR1 plants exhibited an increased root length phenotype. Based on this analysis, AGR1 transgenic plants exhibited a 29% increase in root length. In both 4A and 4B the attached tables show the actual mean values used to generate the bar charts.

[0039] FIG. 5 shows the in soil analysis of roots of the AtAGR1 (SEQ ID NO:1) plants, where the root length of AtAGR1 Arabidopsis lines was measured.

[0040] FIG. 6 shows the gene level ANOVA analysis of the AtAGR1 (SEQ ID NO:1) transgenic plants. The analysis data of all transgenic lines was combined to determine the overall gene performance.

[0041] FIG. 7 shows the gene level ANOVA analysis of rosette dry weights in the AtAGR1 (SEQ ID NO:1) transgenic plants.

### DETAILED DESCRIPTION OF THE INVENTION

[0042] The present invention may be understood more readily by reference to the following detailed description of the preferred embodiments of the invention and the Examples included herein. However, before the present compounds, compositions, and methods are disclosed and described, it is to be understood that this invention is not limited to specific nucleic acids, specific polypeptides, specific cell types, specific host cells, specific conditions, or specific methods, etc., as such may, of course, vary, and the numerous modifications and variations therein will be apparent to those skilled in the art. It is also to be understood that the terminology used herein is for the purpose of describing specific embodiments only and is not intended to be limiting. In particular, the designation of the amino acid sequences as polypeptide “Membrane Transporter-like Polypeptides” (MTPs), in no way limits the functionality of those sequences.

[0043] The present invention relates to MTPs and MTP coding nucleic acids that are important in increasing plant root growth, and/or yiled, and/or for modulating a plant's response to an environmental stress. More particularly, overexpression of these MTP coding nucleic acids in a crop plant results in modulation (increase or decrease, preferably increase) in root growth, and/or increased yield, and/or increased tolerance to an environmental stress. Representative members of the MTP genus are AtAGR1, AtAGR1-2, AtAGR1-3, AtAGR1-4, AtAGR1-5 isolated from Arabidopsis thaliana, and the full-length homologs isolated from canola, soybean, sunflower, maize, rice, linseed, and barley. In a preferred embodiment, all members of the genus are biologically active membrane transporters.

[0044] Accordingly, the present invention encompasses a transgenic crop plant comprising MTP polynucleotide and polypeptide sequences and a method of producing such transgenic crop plant, wherein the expression of the MTP polypeptide in the plant results in increased root growth, and/or yield, and/or tolerance to an environmental stress. In one embodiment, the MTP sequences are from a plant, preferably an Arabidopsis plant, a canola plant, a soybean plant, a rice plant, a sunflower plant, a barley plant, a linseed plant, or a maize plant. In another embodiment, the MTP sequences are the genes as summarized in Table 1. Preferably, the disclosed MTP sequences have significant percent identity to known membrane transporters.

TABLE 1
MTP genes, their origin, nucleotide sequence and corresponding amino acid sequence,
and their percentage of identity shared with AtAGR1 (SEQ ID NO: 2) at the amino acid level
(Needleman-Wunsch algorithm for global sequence alignment, J. Mol. Biol. 48(3): 443-53; Matrix:
Blosum 62; Gap opening penalty: 10.0; Gap extension penalty: 2.0).

| | | Column No. 3 | Column No. 4 | Column No. 5 |
|---|---|---|---|---|
| Column No. 1 | Column No. 2 | Nucleotide | Amino acide | Identity to |
| Gene Name | Organism | SEQ ID NO: | SEQ ID NO: | AtAGR1 (%) |
| AtAGR1 | Arabidopsis thaliana | 1 | 2 | 100 |
| AtAGR1-2 | Arabidopsis thaliana | 3 | 4 | 55 |
| AtAGR1-3 | Arabidopsis thaliana | 5 | 6 | 49 |
| AtAGR1-4 | Arabidopsis thaliana | 7 | 8 | 56 |
| AtAGR1-5 | Arabidopsis thaliana | 9 | 10 | 49 |
| BPS_WIPO_PROT\|US20040031072A1.188567 | Glycine Max | 11 | 12 | 61 |
| BPS_WIPO_PROT\|US20040031072A1.276870 | Glycine Max | 13 | 14 | 61 |
| BPS_WIPO_PROT\|US20040123343A1.117626 | Glycine Max | 15 | 16 | 56 |
| BPS_WIPO_PROT\|US20040123343A1.163144 | Oryza sativa | 17 | 18 | 54 |
| BPS_WIPO_PROT\|US20040123343A1.165006 | Oryza sativa | 19 | 20 | 33 |
| BPS_WIPO_PROT\|US20040123343A1.167381 | Oryza sativa | 21 | 22 | 42 |
| BPS_WIPO_PROT\|US20040123343A1.167385 | Oryza sativa | 23 | 24 | 47 |
| BPS_WIPO_PROT\|US20040214272A1.297960 | Zea Mays | 25 | 26 | 49 |
| AAB26934 | Zea Mays | 27 | 28 | 52 |
| AAB26944 | Glycine Max | 29 | 30 | 78 |
| AAB26950 | Arabidopsis thaliana | 31 | 32 | 60 |
| ABB93849 | Arabidopsis thaliana | 33 | 34 | 91 |
| ADW75841 | Eucalyptus grandis | 35 | 36 | 56 |
| ADW75842 | Eucalyptus grandis | 37 | 38 | 60 |
| NP_564189 | Arabidopsis thaliana | 39 | 40 | 46 |
| NP_565261 | Arabidopsis thaliana | 41 | 42 | 58 |
| NP_915836 | Oryza sativa | 43 | 44 | 28 |
| NP_917177 | Oryza sativa | 45 | 46 | 50 |
| XP_467740 | Oryza sativa | 47 | 48 | 55 |
| XP_475933 | Oryza sativa | 49 | 50 | 47 |
| Q257B0_LUPAL | Lupinus albus | 51 | 52 | 60 |
| Q56X88_ARATH | Arabidopsis thaliana | 53 | 54 | 21 |
| Q5K119_9ROSI | Populus tremula × | 55 | 56 | 35 |
| | Populus tremuloides | | | |
| Q5TK28_PHYPA | Physcomitrella | 57 | 58 | 48 |
| | patens | | | |
| Q673E5_MEDTR | Medicago truncatula | 59 | 60 | 61 |
| Q673E7_MEDTR | Medicago truncatula | 61 | 62 | 60 |
| Q673E8_MEDTR | Medicago truncatula | 63 | 64 | 47 |
| Q6RK61_WHEAT | Triticum aestivum | 65 | 66 | 57 |
| Q71T11_MOMCH | Momordica charantia | 67 | 68 | 58 |
| Q71T12_MOMCH | Momordica charantia | 69 | 70 | 59 |
| Q71T13_MOMCH | Momordica charantia | 71 | 72 | 59 |
| Q769J4_PEA | Pisum sativum | 73 | 74 | 59 |
| Q7X9P6_9ROSI | Populus tomentosa | 75 | 76 | 58 |
| Q84WX3_PEA | Pisum sativum | 77 | 78 | 60 |
| Q84YG8_MEDTR | Medicago truncatula | 79 | 80 | 76 |
| Q8GV73_MEDTR | Medicago truncatula | 81 | 82 | 56 |
| Q8GV74_MEDTR | Medicago truncatula | 83 | 84 | 59 |
| Q8GV75_MEDTR | Medicago truncatula | 85 | 86 | 59 |
| Q8GV76_MEDTR | Medicago truncatula | 87 | 88 | 58 |
| Q8H0E0_CUCSA | Cucumis sativus | 89 | 90 | 60 |
| Q8H1L0_GOSHI | Gossypium hirsutum | 91 | 92 | 55 |
| Q8LKH0_9ROSI | Populus tremula × | 93 | 94 | 60 |
| | Populus tremuloides | | | |
| Q8LKH1_9ROSI | Populus tremula × | 95 | 96 | 60 |
| | Populus tremuloides | | | |
| Q93YM3_BRAJU | Brassica juncea | 97 | 98 | 58 |
| Q93YM4_BRAJU | Brassica juncea | 99 | 100 | 57 |
| Q9AWA4_BRAJU | Brassica juncea | 101 | 102 | 58 |
| Q9FVF6_9ROSI | Populus tremula × | 103 | 104 | 60 |
| | Populus tremuloides | | | |
| PIN1C_ORYSA | Oryza sativa | 105 | 106 | 59 |
| PIN1_ORYSA | Oryza sativa | 107 | 108 | 57 |
| PIN2_ORYSA | Oryza sativa | 109 | 110 | 63 |
| PIN3A_ORYSA | Oryza sativa | 111 | 112 | 57 |
| PIN3_ARATH | Arabidopsis thaliana | 113 | 114 | 57 |
| PIN4_ARATH | Arabidopsis thaliana | 115 | 116 | 58 |
| PIN5_ORYSA | Oryza sativa | 117 | 118 | 30 |
| PIN7_ARATH | Arabidopsis thaliana | 119 | 120 | 57 |
| PINI_ARATH | Arabidopsis thaliana | 121 | 122 | 60 |

[0045] The present invention provides a transgenic crop plant transformed by an MTP coding nucleic acid, wherein expression of the nucleic acid sequence in the crop plant results in increased root growth, and/or increased yield, and/or increased tolerance to an environmental stress as compared to a wild type variety of the plant. In particular, the increased root growth is an increase in the length of the roots. The term “plant” as used herein can, depending on context, be understood to refer to whole plants, plant cells, and plant parts including seeds. The word “plant” also refers to any plant, particularly, to seed plant, and may include, but not limited to, crop plants. Plant parts include, but are not limited to, stems, roots, ovules, stamens, leaves, embryos, meristematic regions, callus tissue, gametophytes, sporophytes, pollen, microspores, and the like. In one embodiment, the transgenic plant is male sterile. Also provided is a plant seed produced by a transgenic plant transformed by an MTP coding nucleic acid, wherein the seed contains the MTP coding nucleic acid, and wherein the plant is true breeding for increased root growth, and/or increased yield, and/or increased tolerance to environmental stress as compared to a wild type variety of the plant. The invention further provides a seed produced by a transgenic plant expressing an MTP, wherein the seed contains the MTP, and wherein the plant is true breeding for increased root growth, and/or increased yield, and/or increased tolerance to environmental stress as compared to a wild type variety of the plant. The invention also provides a product produced by or from the transgenic plants expressing the MTP coding nucleic acid, their plant parts, or their seeds. The product can be obtained using various methods well known in the art. As used herein, the word “product” includes, but not limited to, a foodstuff, feedstuff, a food supplement, feed supplement, cosmetic or pharmaceutical. Foodstuffs are regarded as compositions used for nutrition. These also include compositions for supplementing nutrition. Animal feedstuffs and animal feed supplements, in particular, are regarded as foodstuffs. The invention further provides an agricultural product produced by any of the transgenic plants, plant parts, and plant seeds. Agricultural products include, but are not limited to, plant extracts, proteins, amino acids, carbohydrates, fats, oils, polymers, vitamins, and the like.

[0046] As used herein, the term “variety” refers to a group of plants within a species that share constant characters that separate them from the typical form and from other possible varieties within that species. While possessing at least one distinctive trait, a variety is also characterized by some variation between individuals within the variety, based primarily on the Mendelian segregation of traits among the progeny of succeeding generations. A variety is considered “true breeding” for a particular trait if it is genetically homozygous for that trait to the extent that, when the true-breeding variety is self-pollinated, a significant amount of independent segregation of the trait among the progeny is not observed. In the present invention, the trait arises from the transgenic expression of one or more DNA sequences introduced into a plant variety.

[0047] The crop plants according to the invention will be understood to include dicotyledonous crop plants such as, for example, from the families of the Leguminosae such as pea, alfalfa and soybean; the family of the Umbelliferae, particularly the genus Daucus (very particularly the species carota (carrot)) and Apium (very particularly the species graveolens var. dulce (celery)) and many others; the family of the Solanaceae, particularly the genus Lycopersicon, very particularly the species esculentum (tomato) and the genus Solanum, very particularly the species tuberosum (potato) and melongena (aubergine), tobacco and many others; and the genus Capsicum, very particularly the species annum (pepper) and many others; the family of the Leguminosae, particularly the genus Glycine, very particularly the species max (soybean) and many others; and the family of the Cruciferae, particularly the genus Brassica, very particularly the species napus (oilseed rape), campestris (beet), oleracea cv Tastie (cabbage), oleracea cv Snowball Y (cauliflower) and oleracea cv Emperor (broccoli); and the genus Arabidopsis, very particularly the species thaliana and many others; the family of the Compositae, particularly the genus Lactuca, very particularly the species sativa (lettuce) and many others; and the family of the Malvaceae, particularly the genus Gossypium, very particularly the species known as cotton; and the family of the Fabaceae, particularly the genus Arachis, very particularly the species hypogaea (peanut).

[0048] The crop plants according to the invention also include monocotyledonous crop plants, such as, for example, cereals such as wheat, barley, sorghum and millet, rye, triticale, maize, rice or oats, and sugarcane. Further preferred are trees such as apple, pear, quince, plum, cherry, peach, nectarine, apricot, papaya, mango, and other woody species including coniferous and deciduous trees such as poplar, pine, sequoia, cedar, oak, etc. Especially preferred are Arabidopsis thaliana, Nicotiana tabacum, oilseed rape, soybean, corn (maize), wheat, linseed, potato and tagetes.

[0049] The present invention describes for the first time that the MTP is useful for increasing a crop plant's root growth, and/or yield, and/or tolerance to environmental stress. As used herein, the term polypeptide refers to a chain of at least four amino acids joined by peptide bonds. The chain may be linear, branched, circular, or combinations thereof. Accordingly, the present invention provides for use in crop plants of isolated MTPs selected from any of the organisms as provided in Column No. 2 of Table 1, and homologs thereof. In preferred embodiments, the MTP is selected from: 1) any of MTP polypeptides as provided in Column No. 4 of Table 1; and 2) homologs and orthologs thereof. Homologs and orthologs of the amino acid sequences are defined below.

[0050] The MTPs of the present invention are preferably produced by recombinant DNA techniques. For example, a nucleic acid molecule encoding the polypeptide is cloned into an expression vector (as described below), the expression vector is introduced into a host cell (as described below) and the MTP is expressed in the host cell. The MTP can then be isolated from the cells by an appropriate purification scheme using standard polypeptide purification techniques. For the purposes of the invention, the term “recombinant polynucleotide” refers to a polynucleotide that has been altered, rearranged, or modified by genetic engineering. Examples include any cloned polynucleotide, and polynucleotides that are linked or joined to heterologous sequences. The term “recombinant” does not refer to alterations to polynucleotides that result from naturally occurring events, such as spontaneous mutations. Alternative to recombinant expression, an MTP, or peptide thereof, can be synthesized chemically using standard peptide synthesis techniques. Moreover, native MTP can be isolated from cells (e.g., Arabidopsis thaliana cells), for example using an anti-MTP antibody, which can be produced by standard techniques utilizing an MTP or fragment thereof.

[0051] As used herein, the term “environmental stress” refers to sub-optimal conditions associated with salinity, drought, temperature, metal, chemical, pathogenic and oxidative stresses, or combinations thereof. In preferred embodiments, the environmental stress can be selected from one or more of the group consisting of salinity, drought, or temperature, or combinations thereof, and in particular, can be selected from one or more of the group consisting of high salinity, low water content (drought), or low temperature. In a more preferred embodiment, the environmental stress is drought stress. As also used herein, the term “water use efficiency” refers to the amount of organic matter produced by a plant divided by the amount of water used by the plant in producing it, i.e. the dry weight of a plant in relation to the plant's water use. As used herein, the term “dry weight” refers to everything in the plant other than water, and includes, for example, carbohydrates, proteins, oils, and mineral nutrients. It is also to be understood that as used in the specification and in the claims, “a” or “an” can mean one or more, depending upon the context in which it is used. Thus, for example, reference to “a cell” can mean that at least one cell can be utilized.

[0052] As also used herein, the term “nucleic acid” and “polynucleotide” refer to RNA or DNA that is linear or branched, single or double stranded, or a hybrid thereof. The term also encompasses RNA/DNA hybrids. These terms also encompass untranslated sequence located at both the 3′ and 5′ ends of the coding region of the gene: at least about 1000 nucleotides of sequence upstream from the 5′ end of the coding region and at least about 200 nucleotides of sequence downstream from the 3′ end of the coding region of the gene. Less common bases, such as inosine, 5-methylcytosine, 6-methyladenine, hypoxanthine, and others can also be used for antisense, dsRNA, and ribozyme pairing. For example, polynucleotides that contain C-5 propyne analogues of uridine and cytidine have been shown to bind RNA with high affinity and to be potent antisense inhibitors of gene expression. Other modifications, such as modification to the phosphodiester backbone, or the 2′-hydroxy in the ribose sugar group of the RNA can also be made. The antisense polynucleotides and ribozymes can consist entirely of ribonucleotides, or can contain mixed ribonucleotides and deoxyribonucleotides. The polynucleotides of the invention may be produced by any means, including genomic preparations, cDNA preparations, in vitro synthesis, RT-PCR, and in vitro or in vivo transcription.

[0053] An “isolated” nucleic acid molecule is one that is substantially separated from other nucleic acid molecules, which are present in the natural source of the nucleic acid (i.e., sequences encoding other polypeptides). Preferably, an “isolated” nucleic acid is free of some of the sequences, which naturally flank the nucleic acid (i.e. sequences located at the 5′ and 3′ ends of the nucleic acid) in its naturally occurring replicon. For example, a cloned nucleic acid is considered isolated. In various embodiments, the isolated MTP nucleic acid molecule can contain less than about 5 kb, 4 kb, 3 kb, 2 kb, 1 kb, 0.5 kb, or 0.1 kb of nucleotide sequences which naturally flank the nucleic acid molecule in genomic DNA of the cell from which the nucleic acid is derived (e.g., an Arabidopsis thaliana cell). A nucleic acid is also considered isolated if it has been altered by human intervention, or placed in a locus or location that is not its natural site, or if it is introduced into a cell by agroinfection. Moreover, an “isolated” nucleic acid molecule, such as a cDNA molecule, can be free from some of the other cellular material with which it is naturally associated, or culture medium when produced by recombinant techniques, or chemical precursors or other chemicals when chemically synthesized.

[0054] Specifically excluded from the definition of “isolated nucleic acids” are: naturally-occurring chromosomes (such as chromosome spreads), artificial chromosome libraries, genomic libraries, and cDNA libraries that exist either as an in vitro nucleic acid preparation or as a transfected/transformed host cell preparation, wherein the host cells are either an in vitro heterogeneous preparation or plated as a heterogeneous population of single colonies. Also specifically excluded are the above libraries wherein a specified nucleic acid makes up less than 5% of the number of nucleic acid inserts in the vector molecules. Further specifically excluded are whole cell genomic DNA or whole cell RNA preparations (including whole cell preparations that are mechanically sheared or enzymatically digested). Even further specifically excluded are the whole cell preparations found as either an in vitro preparation or as a heterogeneous mixture separated by electrophoresis wherein the nucleic acid of the invention has not further been separated from the heterologous nucleic acids in the electrophoresis medium (e.g., further separating by excising a single band from a heterogeneous band population in an agarose gel or nylon blot).

[0055] A nucleic acid molecule according to the present invention, e.g., a nucleic acid molecule having a nucleotide sequence as set forth in any of SEQ ID NOS as provided in Column No. 3 of Table 1, or a portion thereof, can be isolated using standard molecular biology techniques and the sequence information provided herein. For example, an MTP cDNA can be isolated from any crop library using all or a portion of any of SEQ ID NOS as provided in Column No. 3 of Table 1. Moreover, a nucleic acid molecule encompassing all or a portion of any of SEQ ID NOS as provided in Column No. 3 of Table 1 can be isolated by the polymerase chain reaction using oligonucleotide primers designed based upon this sequence. For example, mRNA can be isolated from plant cells (e.g., by the guanidinium-thiocyanate extraction procedure of Chirgwin et al., 1979, Biochemistry 18:5294-5299), and cDNA can be prepared using reverse transcriptase (e.g., Moloney MLV reverse transcriptase, available from Gibco/BRL, Bethesda, Md.; or AMV reverse transcriptase, available from Seikagaku America, Inc., St. Petersburg, Fla.). Synthetic oligonucleotide primers for polymerase chain reaction amplification can be designed based upon the nucleotide sequence as set forth in any of sequences shown in Column No. 3 of Table 1. A nucleic acid molecule of the invention can be amplified using cDNA or, alternatively, genomic DNA, as a template and appropriate oligonucleotide primers according to standard PCR amplification techniques. The nucleic acid molecule so amplified can be cloned into an appropriate vector and characterized by DNA sequence analysis. Furthermore, oligonucleotides corresponding to an MTP nucleotide sequence can be prepared by standard synthetic techniques, e.g., using an automated DNA synthesizer.

[0056] In a preferred embodiment, an isolated nucleic acid molecule according to the invention comprises the nucleotide sequences as set forth in any of sequences shown in Column No. 3 of Table 1. These cDNAs may comprise sequences encoding the MTPs, (i.e., the “coding region”), as well as 5′ untranslated sequences and 3′ untranslated sequences. Alternatively, the nucleic acid molecules according to the present invention can comprise only the coding region of any of the sequences as provided in Column No. 3 of Table 1, or can contain whole genomic fragments isolated from genomic DNA. The present invention also includes MTP coding nucleic acids that encode MTPs as described herein. Preferred is an MTP coding nucleic acid that encodes MTP as shown in any of SEQ ID NOS as provided in Column No. 4 of Table 1.

[0057] Moreover, the nucleic acid molecule according to the invention can comprise a portion of the coding region of any of the sequences as provided in Column No. 3 of Table 1, for example, a fragment that can be used as a probe or primer or a fragment encoding a biologically active portion of an MTP. The nucleotide sequences determined from the cloning of the MTP gene from any of the organisms as provided in Table 1 allows for the generation of probes and primers designed for use in identifying and/or cloning MTP homologs in other cell types and organisms, as well as MTP homologs from crop plants and related species. The portion of the coding region can also encode a biologically active fragment of an MTP.

[0058] As used herein, the term “biologically active portion of” an MTP is intended to include a portion, e.g., a domain/motif, of an MTP that participates in modulation of root growth, and/or yield, and/or stress tolerance in a plant, and more preferably, drought tolerance. For the purposes of the present invention, modulation of root growth, and/or yield, and/or stress tolerance refers to at least a 10% increase or decrease in the growth of the roots, and/or yield, and/or stress tolerance of a transgenic plant comprising an MTP expression cassette (or expression vector) as compared to the root growth, and/or yield, and/or stress tolerance of a non-transgenic control plant. Methods for quantitating growth, and/or yield, and/or stress tolerance are provided at least in Examples 5, 6, and 17-19 below. In a preferred embodiment, the biologically active portion of an MTP increases a plant's root growth, preferably by increasing the root length.

[0059] Biologically active portions of an MTP include peptides comprising amino acid sequences derived from the amino acid sequence of an MTP, e.g., an amino acid sequence of any of SEQ ID NOS as provided in Column No. 4 of Table 1, or the amino acid sequence of a polypeptide identical to an MTP, which includes fewer amino acids than a full length MTP or the full length polypeptide which is identical to an MTP, and exhibits at least one activity of an MTP. Typically, biologically active portions (e.g., peptides which are, for example, 5, 10, 15, 20, 30, 35, 36, 37, 38, 39, 40, 50, 100, or more amino acids in length) comprise a domain or motif with at least one activity of an MTP. Moreover, other biologically active portions in which other regions of the polypeptide are deleted, can be prepared by recombinant techniques and evaluated for one or more of the activities described herein. Preferably, the biologically active portion of an MTP includes one or more selected domains/motifs or portions thereof having a membrane transporter activity.

[0060] In one embodiment, the biologically active portion of an MTP comprises at least one of the following conserved motifs. The first motif is PLYVAMILAY (SEQ ID NO:123). The second motif is INRFVAXFAVPLLSFHFI (SEQ ID NO:124), wherein X is selected from a group consisting of valine, glycine, alanine, leucine, isoleucine, and proline amino acid residues. The third motif is FSLSTLPNTLVMGIPLL (SEQ ID NO:125). In another embodiment, the first motif is present at a position between amino acid positions 16 and 25 of the polypeptide, the second motif is present at a position between amino acid positions 42 and 59 of the polypeptide, and the third motif is present at a position between amino acid positions 105 and 121 of the polypeptide.

[0061] The invention also provides MTP chimeric or fusion polypeptides. As used herein, an MTP “chimeric polypeptide” or “fusion polypeptide” comprises an MTP operatively linked to a non-MTP. An MTP refers to a polypeptide having an amino acid sequence corresponding to an MTP, whereas a non-MTP refers to a polypeptide having an amino acid sequence corresponding to a polypeptide which is not substantially identical to the MTP, e.g., a polypeptide that is different from the MTP and is derived from the same or a different organism. With respect to the fusion polypeptide, the term “operatively linked” is intended to indicate that the MTP and the non-MTP are fused to each other so that both sequences fulfill the proposed function attributed to the sequence used. The non-MTP can be fused to the N-terminus or C-terminus of the MTP. For example, in one embodiment, the fusion polypeptide is a GST-MTP fusion polypeptide in which the MTP sequences are fused to the C-terminus of the GST sequences. Such fusion polypeptides can facilitate the purification of recombinant MTPs. In another embodiment, the fusion polypeptide is an MTP containing a heterologous signal sequence at its N-terminus. In certain host cells (e.g., mammalian host cells), expression and/or secretion of an MTP can be increased through use of a heterologous signal sequence.

[0062] Preferably, an MTP chimeric or fusion polypeptide of the invention is produced by standard recombinant DNA techniques. For example, DNA fragments coding for the different polypeptide sequences are ligated together in-frame in accordance with conventional techniques, for example by employing blunt-ended or stagger-ended termini for ligation, restriction enzyme digestion to provide for appropriate termini, filling-in of cohesive ends as appropriate, alkaline phosphatase treatment to avoid undesirable joining and enzymatic ligation. In another embodiment, the fusion gene can be synthesized by conventional techniques including automated DNA synthesizers. Alternatively, PCR amplification of gene fragments can be carried out using anchor primers that give rise to complementary overhangs between two consecutive gene fragments that can subsequently be annealed and re-amplified to generate a chimeric gene sequence (See, for example, Current Protocols in Molecular Biology, Eds. Ausubel et al. John Wiley & Sons: 1992). Moreover, many expression vectors are commercially available that already encode a fusion moiety (e.g., a GST polypeptide). An MTP encoding nucleic acid can be cloned into such an expression vector such that the fusion moiety is linked in-frame to the MTP.

[0063] In addition to fragments and fusion polypeptides of the MTPs described herein, the present invention includes homologs and analogs of naturally occurring MTPs and MTP encoding nucleic acids in a plant. “Homologs” are defined herein as two nucleic acids or polypeptides that have similar, or “identical,” nucleotide or amino acid sequences, respectively. Homologs include allelic variants, orthologs, paralogs, agonists, and antagonists of MTPs as defined hereafter. The term “homolog” further encompasses nucleic acid molecules that differ from the nucleotide sequence as set forth in any of SEQ ID NOS as provided in Column No. 3 of Table 1 (and portions thereof) due to degeneracy of the genetic code and thus encode the same MTP as that encoded by the corresponding nucleotide sequence as set forth in such a SEQ ID NO as provided in Column No. 3 of Table 1. As used herein, a “naturally occurring” MTP refers to an MTP amino acid sequence that occurs in nature. Preferably, a naturally occurring MTP comprises an amino acid sequence of any of SEQ ID NOS as provided in Column No. 4 of Table 1.

[0064] An agonist of the MTP can retain substantially the same, or a subset, of the biological activities of the MTP. An antagonist of the MTP can inhibit one or more of the activities of the naturally occurring form of the MTP.

[0065] Nucleic acid molecules corresponding to natural allelic variants and analogs, orthologs, and paralogs of an MTP cDNA can be isolated based on their identity to the MTP nucleic acids described herein using MTP cDNAs, or a portion thereof, as a hybridization probe according to standard hybridization techniques under stringent hybridization conditions. In an alternative embodiment, homologs of the MTP can be identified by screening combinatorial libraries of mutants, e.g., truncation mutants, of the MTP for MTP agonist or antagonist activity. In one embodiment, a variegated library of MTP variants is generated by combinatorial mutagenesis at the nucleic acid level and is encoded by a variegated gene library. A variegated library of MTP variants can be produced by, for example, enzymatically ligating a mixture of synthetic oligonucleotides into gene sequences such that a degenerate set of potential MTP sequences is expressible as individual polypeptides, or alternatively, as a set of larger fusion polypeptides (e.g., for phage display) containing the set of MTP sequences therein. There are a variety of methods that can be used to produce libraries of potential MTP homologs from a degenerate oligonucleotide sequence. Chemical synthesis of a degenerate gene sequence can be performed in an automatic DNA synthesizer, and the synthetic gene is then ligated into an appropriate expression vector. Use of a degenerate set of genes allows for the provision, in one mixture, of all of the sequences encoding the desired set of potential MTP sequences. Methods for synthesizing degenerate oligonucleotides are known in the art.

[0066] In addition, libraries of fragments of the MTP coding regions can be used to generate a variegated population of MTP fragments for screening and subsequent selection of homologs of an MTP. In one embodiment, a library of coding sequence fragments can be generated by treating a double stranded PCR fragment of an MTP coding sequence with a nuclease under conditions wherein nicking occurs only about once per molecule, denaturing the double stranded DNA, renaturing the DNA to form double stranded DNA, which can include sense/antisense pairs from different nicked products, removing single stranded portions from reformed duplexes by treatment with S1 nuclease, and ligating the resulting fragment library into an expression vector. By this method, an expression library can be derived which encodes N-terminal, C-terminal, and internal fragments of various sizes of the MTP.

[0067] Several techniques are known in the art for screening gene products of combinatorial libraries made by point mutations or truncation, and for screening cDNA libraries for gene products having a selected property. Such techniques are adaptable for rapid screening of the gene libraries generated by the combinatorial mutagenesis of MTP homologs. The most widely used techniques, which are amenable to high throughput analysis, for screening large gene libraries typically include cloning the gene library into replicable expression vectors, transforming appropriate cells with the resulting library of vectors, and expressing the combinatorial genes under conditions in which detection of a desired activity facilitates isolation of the vector encoding the gene whose product was detected. Recursive ensemble mutagenesis (REM), a technique that enhances the frequency of functional mutants in the libraries, can be used in combination with the screening assays to identify MTP homologs (Arkin and Yourvan, 1992, PNAS 89:7811-7815; Delgrave et al., 1993, Polypeptide Engineering 6(3):327-331). In another embodiment, cell based assays can be exploited to analyze a variegated MTP library, using methods well known in the art. The present invention further provides a method of identifying a novel MTP, comprising (a) raising a specific antibody response to an MTP, or a fragment thereof, as described herein; (b) screening putative MTP material with the antibody, wherein specific binding of the antibody to the material indicates the presence of a potentially novel MTP; and (c) analyzing the bound material in comparison to known MTP, to determine its novelty.

[0068] As stated above, the present invention relates to MTPs and homologs thereof. To determine the percent sequence identity of two amino acid sequences (e.g., the sequence of any of SEQ ID NOS as provided in Column No. 4 of Table 1, and a mutant form thereof), the sequences are aligned for optimal comparison purposes (e.g., gaps can be introduced in the sequence of one polypeptide for optimal alignment with the other polypeptide or nucleic acid). The amino acid residues at corresponding amino acid positions are then compared. When a position in one sequence (e.g., the sequence of any of SEQ ID NOS as provided in Column No. 4 of Table 1) is occupied by the same amino acid residue as the corresponding position in the other sequence (e.g., the sequence of a mutant form of the corresponding SEQ ID NO as provided in Column No. 4 of Table 1), then the molecules are identical at that position. The same type of comparison can be made between two nucleic acid sequences.

[0069] The percent sequence identity between the two sequences is a function of the number of identical positions shared by the sequences (i.e., percent sequence identity=numbers of identical positions/total numbers of positions×100). Preferably, the isolated amino acid homologs included in the present invention are at least about 50-60%, preferably at least about 60-70%, and more preferably at least about 70-75%, 75-80%, 80-85%, 85-90%, or 90-95%, and most preferably at least about 96%, 97%, 98%, 99%, or more identical to an entire amino acid sequence shown in any of SEQ ID NOS as provided in Column No. 4 of Table 1. In yet another embodiment, the isolated amino acid homologs included in the present invention are at least about 50-60%, preferably at least about 60-70%, and more preferably at least about 70-75%, 75-80%, 80-85%, 85-90%, or 90-95%, and most preferably at least about 96%, 97%, 98%, 99%, or more identical to an entire amino acid sequence encoded by a nucleic acid sequence shown in any of SEQ ID NOS as provided in Column No. 3 of Table 1. In one embodiment, the isolated amino acid homolog comprises at least one of the following three conserved motifs. The first motif is PLYVAMILAY (SEQ ID NO:123). The second motif is INRFVAXFAVPLLSFHFI (SEQ ID NO:124), wherein X is selected from a group consisting of valine, glycine, alanine, leucine, isoleucine, and proline amino acid residues. The third motif is FSLSTLPNTLVMGIPLL (SEQ ID NO:125). In another embodiment, the first motif is present at a position between amino acid positions 16 and 25 of the polypeptide, the second motif is present at a position between amino acid positions 42 and 59 of the polypeptide, and the third motif is present at a position between amino acid positions 105 and 121 of the polypeptide.

[0070] In another preferred embodiment, an isolated nucleic acid homolog of the invention comprises a nucleotide sequence which is at least about 40-60%, preferably at least about 60-70%, more preferably at least about 70-75%, 75-80%, 80-85%, 85-90%, or 90-95%, and even more preferably at least about 95%, 96%, 97%, 98%, 99%, or more identical to a nucleotide sequence shown in any of SEQ ID NOS as provided in Column No. 3 of Table 1, or to a portion comprising at least 60 consecutive nucleotides thereof. The preferable length of sequence comparison for nucleic acids is at least 75 nucleotides, more preferably at least 100 nucleotides, and most preferably the entire length of the coding region. It is even more preferable that the nucleic acid homologs encode proteins having homology with any of SEQ ID NOS as provided in Column No. 4 of Table 1.

[0071] It is further preferred that the isolated nucleic acid homolog of the invention encodes an MTP, or portion thereof, that is at least 80% identical to an amino acid sequence of any of SEQ ID NOS as provided in Column No. 4 of Table 1, and that functions as a modulator of root growth, and/or yield, and/or an environmental stress response in a plant. In a more preferred embodiment, overexpression of the nucleic acid homolog in a plant increases the plant's root growth, and/or yield, and/or the tolerance of the plant to an environmental stress. In a further preferred embodiment, the nucleic acid homolog encodes an MTP that functions as a membrane transporter.

[0072] For the purposes of the invention, the percent sequence identity between two nucleic acid or polypeptide sequences is determined using the Needleman-Wunsch global alignment algorithm (J. Mol. Biol. 48(3):443-53) implemented in the European Molecular Biology Open Software Suite (EMBOSS). For purposes of a multiple alignment (Clustal W algorithm), the gap opening penalty is 10, and the gap extension penalty is 0.05 with blosum62 matrix. It is to be understood that for the purposes of determining sequence identity when comparing a DNA sequence to an RNA sequence, a thymidine nucleotide is equivalent to a uracil nucleotide.

[0073] In another aspect, the invention relates to an isolated nucleic acid comprising a polynucleotide that hybridizes to the polynucleotide of any of SEQ ID NOS as provided in Column No. 3 of Table 1 under stringent conditions. More particularly, an isolated nucleic acid molecule according to the invention is at least 15 nucleotides in length and hybridizes under stringent conditions to the nucleic acid molecule comprising a nucleotide sequence of any of SEQ ID NOS as provided in Column No. 3 of Table 1. In other embodiments, the nucleic acid is at least 30, 50, 100, 250, or more nucleotides in length. Preferably, an isolated nucleic acid homolog of the invention comprises a nucleotide sequence which hybridizes under highly stringent conditions to the nucleotide sequence shown in any of SEQ ID NOS as provided in Column No. 3 of Table 1, and functions as a modulator of root growth, and/or yield, and/or stress tolerance in a plant. In a further preferred embodiment, overexpression of the isolated nucleic acid homolog in a plant increases a plant's root growth, and/or yield, and/or tolerance to an environmental stress. In an even further preferred embodiment, the isolated nucleic acid homolog encodes an MTP that functions as a membrane transporter.

[0074] As used herein with regard to hybridization for DNA to a DNA blot, the term “stringent conditions” may refer to hybridization overnight at 60° C. in 10× Denhart's solution, 6×SSC, 0.5% SDS, and 100 μg/ml denatured salmon sperm DNA. Blots are washed sequentially at 62° C. for 30 minutes each time in 3×SSC/0.1% SDS, followed by 1×SSC/0.1% SDS, and finally 0.1×SSC/0.1% SDS. In a preferred embodiment, the phrase “stringent conditions” refers to hybridization in a 6×SSC solution at 65° C. As also used herein, “highly stringent conditions” refers to hybridization overnight at 65° C. in 10× Denharts solution, 6×SSC, 0.5% SDS, and 100 μg/ml denatured salmon sperm DNA. Blots are washed sequentially at 65° C. for 30 minutes each time in 3×SSC/0.1% SDS, followed by 1×SSC/0.1% SDS, and finally 0.1×SSC/0.1% SDS. Methods for nucleic acid hybridizations are described in Meinkoth and Wahl, 1984, Anal. Biochem. 138:267-284; Current Protocols in Molecular Biology, Chapter 2, Ausubel et al. Eds., Greene Publishing and Wiley-Interscience, New York, 1995; and Tijssen, 1993, Laboratory Techniques in Biochemistry and Molecular Biology Hybridization with Nucleic Acid Probes, Part I, Chapter 2, Elsevier, N.Y., 1993. Preferably, an isolated nucleic acid molecule of the invention that hybridizes under stringent or highly stringent conditions to a sequence of any of SEQ ID NOS as provided in Column No. 3 of Table 1 corresponds to a naturally occurring nucleic acid molecule. As used herein, a “naturally occurring” nucleic acid molecule refers to an RNA or DNA molecule having a nucleotide sequence that occurs in nature (e.g., encodes a natural polypeptide). In one embodiment, the nucleic acid encodes a naturally occurring MTP.

[0075] Using the above-described methods, and others known to those of skill in the art, one of ordinary skill in the art can isolate homologs of the MTPs comprising amino acid sequences shown in any of SEQ ID NOS as provided in Column No. 4 of Table 1. One subset of these homologs is allelic variants. As used herein, the term “allelic variant” refers to a nucleotide sequence containing polymorphisms that lead to changes in the amino acid sequences of an MTP and that exist within a natural population (e.g., a plant species or variety). Such natural allelic variations can typically result in 1-5% variance in an MTP nucleic acid. Allelic variants can be identified by sequencing the nucleic acid sequence of interest in a number of different plants, which can be readily carried out by using hybridization probes to identify the same MTP genetic locus in those plants. Any and all such nucleic acid variations and resulting amino acid polymorphisms or variations in an MTP that are the result of natural allelic variation and that do not alter the functional activity of an MTP, are intended to be within the scope of the invention.

[0076] Moreover, nucleic acid molecules encoding MTPs from the same or other species such as MTP analogs, orthologs, and paralogs, are intended to be within the scope of the present invention. As used herein, the term “analogs” refers to two nucleic acids that have the same or similar function, but that have evolved separately in unrelated organisms. As used herein, the term “orthologs” refers to two nucleic acids from different species, but that have evolved from a common ancestral gene by speciation. Normally, orthologs encode polypeptides having the same or similar functions. As also used herein, the term “paralogs” refers to two nucleic acids that are related by duplication within a genome. Paralogs usually have different functions, but these functions may be related (Tatusov, R. L. et al., 1997, Science 278(5338):631-637). Analogs, orthologs, and paralogs of a naturally occurring MTP can differ from the naturally occurring MTP by post-translational modifications, by amino acid sequence differences, or by both. Post-translational modifications include in vivo and in vitro chemical derivatization of polypeptides, e.g., acetylation, carboxylation, phosphorylation, or glycosylation, and such modifications may occur during polypeptide synthesis or processing or following treatment with isolated modifying enzymes. In particular, orthologs of the invention will generally exhibit at least 80-85%, more preferably, 85-90% or 90-95%, and most preferably 95%, 96%, 97%, 98%, or even 99% identity, or 100% sequence identity, with all or part of a naturally occurring MTP amino acid sequence, and will exhibit a function similar to an MTP. Preferably, an MTP ortholog of the present invention functions as a modulator of root growth and/or an environmental stress response in a plant and/or functions as a membrane transporter. More preferably, an MTP ortholog increases the root growth and/or stress tolerance of a plant. In one embodiment, the MTP orthologs function as a membrane transporter.

[0077] In addition to naturally-occurring variants of an MTP sequence that may exist in the population, the skilled artisan will further appreciate that changes can be introduced by mutation into a nucleotide sequence of any of SEQ ID NOS as provided in Column No. 4 of Table 1, thereby leading to changes in the amino acid sequence of the encoded MTP, without altering the functional activity of the MTP. For example, nucleotide substitutions leading to amino acid substitutions at “non-essential” amino acid residues can be made in a sequence of any of SEQ ID NOS as provided in Column No. 3 of Table 1. A “non-essential” amino acid residue is a residue that can be altered from the wild-type sequence of one of the MTPs without altering the activity of said MTP, whereas an “essential” amino acid residue is required for MTP activity. Other amino acid residues, however, (e.g., those that are not conserved or only semi-conserved in the domain having MTP activity) may not be essential for activity and thus are likely to be amenable to alteration without altering MTP activity.

[0078] Accordingly, another aspect of the invention pertains to nucleic acid molecules encoding MTPs that contain changes in amino acid residues that are not essential for MTP activity. Such MTPs differ in amino acid sequence from a sequence contained in any of SEQ ID NOS as provided in Column No. 4 of Table 1, yet retain at least one of the MTP activities described herein. In one embodiment, the isolated nucleic acid molecule comprises a nucleotide sequence encoding a polypeptide, wherein the polypeptide comprises an amino acid sequence at least about 50-60% identical to the sequence of any of SEQ ID NOS as provided in Column No. 4 of Table 1, more preferably at least about 60-70% identical to the sequence of any of SEQ ID NOS as provided in Column No. 4 of Table 1, even more preferably at least about 70-75%, 75-80%, 80-85%, 85-90%, or 90-95% identical to the sequence of any of SEQ ID NOS as provided in Column No. 4 of Table 1, and most preferably at least about 96%, 97%, 98%, or 99% identical to the sequence of any of SEQ ID NOS as provided in Column No. 4 of Table 1. The preferred MTP homologs of the present invention preferably participate in a plant's root growth, and/or yield, and/or a stress tolerance response in a plant, or more particularly, function as a membrane transpor.

[0079] An isolated nucleic acid molecule encoding an MTP having sequence identity with a polypeptide sequence of any of SEQ ID NOS as provided in Column No. 4 of Table 1 can be created by introducing one or more nucleotide substitutions, additions, or deletions into a nucleotide sequence of any of SEQ ID NOS as provided in Column No. 3 of Table 1, such that one or more amino acid substitutions, additions, or deletions are introduced into the encoded polypeptide. Mutations can be introduced into the sequence of any of SEQ ID NOS as provided in Column No. 3 of Table 1 by standard techniques, such as site-directed mutagenesis and PCR-mediated mutagenesis. Preferably, conservative amino acid substitutions are made at one or more predicted non-essential amino acid residues. A “conservative amino acid substitution” is one in which the amino acid residue is replaced with an amino acid residue having a similar side chain.

[0080] Families of amino acid residues having similar side chains have been defined in the art. These families include amino acids with basic side chains (e.g., lysine, arginine, histidine), acidic side chains (e.g., aspartic acid, glutamic acid), uncharged polar side chains (e.g., glycine, asparagine, glutamine, serine, threonine, tyrosine, cysteine), nonpolar side chains (e.g., alanine, valine, leucine, isoleucine, proline, phenylalanine, methionine, tryptophan), beta-branched side chains (e.g., threonine, valine, isoleucine), and aromatic side chains (e.g., tyrosine, phenylalanine, tryptophan, histidine). Thus, a predicted nonessential amino acid residue in an MTP is preferably replaced with another amino acid residue from the same side chain family. Alternatively, in another embodiment, mutations can be introduced randomly along all or part of an MTP coding sequence, such as by saturation mutagenesis, and the resultant mutants can be screened for an MTP activity described herein to identify mutants that retain MTP activity. Following mutagenesis of the sequence of any of SEQ ID NOS as provided in Column No. 3 of Table 1 the encoded polypeptide can be expressed recombinantly and the activity of the polypeptide can be determined by analyzing the root growth, and/or yield, and/or stress tolerance of a plant expressing the polypeptide as described at least in Examples 5, 6, and 17-19.

[0081] Additionally, optimized MTP nucleic acids can be created. Preferably, an optimized MTP nucleic acid encodes an MTP that modulates a plant's root growth, and/or yield, and/or tolerance to an environmental stress, and more preferably increases a plant's root growth, and/or yield, and/or tolerance to an environmental stress upon its overexpression in the plant. As used herein, “optimized” refers to a nucleic acid that is genetically engineered to increase its expression in a given plant or animal. To provide plant optimized MTP nucleic acids, the DNA sequence of the gene can be modified to 1) comprise codons preferred by highly expressed plant genes; 2) comprise an A+T content in nucleotide base composition to that substantially found in plants; 3) form a plant initiation sequence; or 4) to eliminate sequences that cause destabilization, inappropriate polyadenylation, degradation and termination of RNA, or that form secondary structure hairpins or RNA splice sites. Increased expression of MTP nucleic acids in plants can be achieved by utilizing the distribution frequency of codon usage in plants in general or in a particular plant. Methods for optimizing nucleic acid expression in plants can be found in EPA 0359472; EPA 0385962; PCT Application No. WO 91/16432; U.S. Pat. No. 5,380,831; U.S. Pat. No. 5,436,391; Perlack et al., 1991, Proc. Natl. Acad. Sci. USA 88:3324-3328; and Murray et al., 1989, Nucleic Acids Res. 17:477-498.

[0082] As used herein, “frequency of preferred codon usage” refers to the preference exhibited by a specific host cell in usage of nucleotide codons to specify a given amino acid. To determine the frequency of usage of a particular codon in a gene, the number of occurrences of that codon in the gene is divided by the total number of occurrences of all codons specifying the same amino acid in the gene. Similarly, the frequency of preferred codon usage exhibited by a host cell can be calculated by averaging frequency of preferred codon usage in a large number of genes expressed by the host cell. It is preferable that this analysis be limited to genes that are highly expressed by the host cell. The percent deviation of the frequency of preferred codon usage for a synthetic gene from that employed by a host cell is calculated first by determining the percent deviation of the frequency of usage of a single codon from that of the host cell followed by obtaining the average deviation over all codons. As defined herein, this calculation includes unique codons (i.e., ATG and TGG). In general terms, the overall average deviation of the codon usage of an optimized gene from that of a host cell is calculated using the equation 1A=n=1 Z Xₙ−YₙXₙ times 100 Z where Xₙ=frequency of usage for codon n in the host cell; Yₙ=frequency of usage for codon n in the synthetic gene; n represents an individual codon that specifies an amino acid; and the total number of codons is Z. The overall deviation of the frequency of codon usage, A, for all amino acids should preferably be less than about 25%, and more preferably less than about 10%.

[0083] Hence, an MTP nucleic acid can be optimized such that its distribution frequency of codon usage deviates, preferably, no more than 25% from that of highly expressed plant genes and, more preferably, no more than about 10%. In addition, consideration is given to the percentage G+C content of the degenerate third base (monocotyledons appear to favor G+C in this position, whereas dicotyledons do not). It is also recognized that the XCG (where X is A, T, C, or G) nucleotide is the least preferred codon in dicots whereas the XTA codon is avoided in both monocots and dicots. Optimized MTP nucleic acids of this invention also preferably have CG and TA doublet avoidance indices closely approximating those of the chosen host plant (e.g., Arabidopsis thaliana, Oryza sativa, etc.). More preferably these indices deviate from that of the host by no more than about 10-15%.

[0084] In addition to the nucleic acid molecules encoding the MTPs described above, another aspect of the invention pertains to isolated nucleic acid molecules that are antisense thereto. Antisense polynucleotides are thought to inhibit gene expression of a target polynucleotide by specifically binding the target polynucleotide and interfering with transcription, splicing, transport, translation, and/or stability of the target polynucleotide. Methods are described in the prior art for targeting the antisense polynucleotide to the chromosomal DNA, to a primary RNA transcript, or to a processed mRNA. Preferably, the target regions include splice sites, translation initiation codons, translation termination codons, and other sequences within the open reading frame.

[0085] The term “antisense,” for the purposes of the invention, refers to a nucleic acid comprising a polynucleotide that is sufficiently complementary to all or a portion of a gene, primary transcript, or processed mRNA, so as to interfere with expression of the endogenous gene. “Complementary” polynucleotides are those that are capable of base pairing according to the standard Watson-Crick complementarity rules. Specifically, purines will base pair with pyrimidines to form a combination of guanine paired with cytosine (G:C) and adenine paired with either thymine (A:T) in the case of DNA, or adenine paired with uracil (A:U) in the case of RNA. It is understood that two polynucleotides may hybridize to each other even if they are not completely complementary to each other, provided that each has at least one region that is substantially complementary to the other. The term “antisense nucleic acid” includes single stranded RNA as well as double-stranded DNA expression cassettes that can be transcribed to produce an antisense RNA. “Active” antisense nucleic acids are antisense RNA molecules that are capable of selectively hybridizing with a primary transcript or mRNA encoding a polypeptide having at least 80% sequence identity with the polypeptide of any of SEQ ID NOS as provided in Column No. 4 of Table 1.

[0086] The antisense nucleic acid can be complementary to an entire MTP coding strand, or to only a portion thereof. In one embodiment, an antisense nucleic acid molecule is antisense to a “coding region” of the coding strand of a nucleotide sequence encoding an MTP. The term “coding region” refers to the region of the nucleotide sequence comprising codons that are translated into amino acid residues. In another embodiment, the antisense nucleic acid molecule is antisense to a “noncoding region” of the coding strand of a nucleotide sequence encoding an MTP. The term “noncoding region” refers to 5′ and 3′ sequences that flank the coding region that are not translated into amino acids (i.e., also referred to as 5′ and 3′ untranslated regions). The antisense nucleic acid molecule can be complementary to the entire coding region of MTP mRNA, but more preferably is an oligonucleotide that is antisense to only a portion of the coding or noncoding region of MTP mRNA. For example, the antisense oligonucleotide can be complementary to the region surrounding the translation start site of MTP mRNA. An antisense oligonucleotide can be, for example, about 5, 10, 15, 20, 25, 30, 35, 40, 45, or 50 nucleotides in length. Typically, the antisense molecules of the present invention comprise an RNA having 60-100% sequence identity with at least 14 consecutive nucleotides of any of SEQ ID NOS as provided in Column No. 3 of Table 1 or a polynucleotide encoding a polypeptide of any of SEQ ID NOS as provided in Column No. 4 of Table 1. Preferably, the sequence identity will be at least 70%, more preferably at least 75%, 80%, 85%, 90%, 95%, or 98%, and most preferably 99%.

[0087] An antisense nucleic acid of the invention can be constructed using chemical synthesis and enzymatic ligation reactions using procedures known in the art. For example, an antisense nucleic acid (e.g., an antisense oligonucleotide) can be chemically synthesized using naturally occurring nucleotides or variously modified nucleotides designed to increase the biological stability of the molecules or to increase the physical stability of the duplex formed between the antisense and sense nucleic acids, e.g., phosphorothioate derivatives and acridine substituted nucleotides can be used. Examples of modified nucleotides which can be used to generate the antisense nucleic acid include 5-fluorouracil, 5-bromouracil, 5-chlorouracil, 5-iodouracil, hypoxanthine, xanthine, 4-acetylcytosine, 5-(carboxyhydroxylmethyl) uracil, 5-carboxymethylaminomethyl-2-thiouridine, 5-carboxymethylaminomethyluracil, dihydrouracil, beta-D-galactosylqueosine, inosine, N6-isopentenyladenine, 1-methylguanine, 1-methylinosine, 2,2-dimethylguanine, 2-methyladenine, 2-methylguanine, 3-methylcytosine, 5-methylcytosine, N6-adenine, 7-methylguanine, 5-methylaminomethyluracil, 5-methoxyaminomethyl-2-thiouracil, beta-D-mannosylqueosine, 5′-methoxycarboxymethyluracil, 5-methoxyuracil, 2-methylthio-N-6-isopentenyladenine, uracil-5-oxyacetic acid (v), wybutoxosine, pseudouracil, queosine, 2-thiocytosine, 5-methyl-2-thiouracil, 2-thiouracil, 4-thiouracil, 5-methyluracil, uracil-5-oxyacetic acid methylester, uracil-5-oxyacetic acid (v), 5-methyl-2-thiouracil, 3-(3-amino-3-N-2-carboxypropyl) uracil, (acp3)w, and 2,6-diaminopurine. Alternatively, the antisense nucleic acid can be produced biologically using an expression vector into which a nucleic acid has been subcloned in an antisense orientation (i.e., RNA transcribed from the inserted nucleic acid will be of an antisense orientation to a target nucleic acid of interest, described further in the following subsection).

[0088] In yet another embodiment, the antisense nucleic acid molecule of the invention is an α-anomeric nucleic acid molecule. An α-anomeric nucleic acid molecule forms specific double-stranded hybrids with complementary RNA in which, contrary to the usual β-units, the strands run parallel to each other (Gaultier et al., 1987, Nucleic Acids. Res. 15:6625-6641). The antisense nucleic acid molecule can also comprise a 2′-O-methylribonucleotide (Inoue et al., 1987, Nucleic Acids Res. 15:6131-6148) or a chimeric RNA-DNA analogue (Inoue et al., 1987, FEBS Lett. 215:327-330).

[0089] The antisense nucleic acid molecules of the invention are typically administered to a cell or generated in situ such that they hybridize with or bind to cellular mRNA and/or genomic DNA encoding an MTP to thereby inhibit expression of the polypeptide, e.g., by inhibiting transcription and/or translation. The hybridization can be by conventional nucleotide complementarity to form a stable duplex, or, for example, in the case of an antisense nucleic acid molecule which binds to DNA duplexes, through specific interactions in the major groove of the double helix. The antisense molecule can be modified such that it specifically binds to a receptor or an antigen expressed on a selected cell surface, e.g., by linking the antisense nucleic acid molecule to a peptide or an antibody which binds to a cell surface receptor or antigen. The antisense nucleic acid molecule can also be delivered to cells using the vectors described herein. To achieve sufficient intracellular concentrations of the antisense molecules, vector constructs in which the antisense nucleic acid molecule is placed under the control of a strong prokaryotic, viral, or eukaryotic (including plant) promoter are preferred.

[0090] As an alternative to antisense polynucleotides, ribozymes, sense polynucleotides, or double stranded RNA (dsRNA) can be used to reduce expression of an MTP polypeptide. As used herein, the term “ribozyme” refers to a catalytic RNA-based enzyme with ribonuclease activity that is capable of cleaving a single-stranded nucleic acid, such as an mRNA, to which it has a complementary region. Ribozymes (e.g., hammerhead ribozymes described in Haselhoff and Gerlach, 1988, Nature 334:585-591) can be used to catalytically cleave MTP mRNA transcripts to thereby inhibit translation of MTP mRNA. A ribozyme having specificity for an MTP-encoding nucleic acid can be designed based upon the nucleotide sequence of an MTP cDNA, as disclosed herein (i.e., any of SEQ ID NOS as provided in Column No. 3 of Table 1) or on the basis of a heterologous sequence to be isolated according to methods taught in this invention. For example, a derivative of a Tetrahymena L-19 IVS RNA can be constructed in which the nucleotide sequence of the active site is complementary to the nucleotide sequence to be cleaved in an MTP-encoding mRNA. See, e.g., U.S. Pat. Nos. 4,987,071 and 5,116,742 to Cech et al. Alternatively, MTP mRNA can be used to select a catalytic RNA having a specific ribonuclease activity from a pool of RNA molecules. See, e.g., Bartel, D. and Szostak, J. W., 1993, Science 261:1411-1418. In preferred embodiments, the ribozyme will contain a portion having at least 7, 8, 9, 10, 12, 14, 16, 18, or 20 nucleotides, and more preferably 7 or 8 nucleotides, that have 100% complementarity to a portion of the target RNA. Methods for making ribozymes are known to those skilled in the art. See, e.g., U.S. Pat. Nos. 6,025,167; 5,773,260; and 5,496,698.

[0091] The term “dsRNA,” as used herein, refers to RNA hybrids comprising two strands of RNA. The dsRNAs can be linear or circular in structure. In a preferred embodiment, dsRNA is specific for a polynucleotide encoding either the polypeptide of any of SEQ ID NOS as provided in Column No. 4 of Table 1 or a polypeptide having at least 80% sequence identity with a polypeptide of any of SEQ ID NOS as provided in Column No. 4 of Table 1. The hybridizing RNAs may be substantially or completely complementary. By “substantially complementary,” is meant that when the two hybridizing RNAs are optimally aligned using the BLAST program as described above, the hybridizing portions are at least 95% complementary. Preferably, the dsRNA will be at least 100 base pairs in length. Typically, the hybridizing RNAs will be of identical length with no over hanging 5′ or 3′ ends and no gaps. However, dsRNAs having 5′ or 3′ overhangs of up to 100 nucleotides may be used in the methods of the invention.

[0092] The dsRNA may comprise ribonucleotides, ribonucleotide analogs such as 2′-O-methyl ribosyl residues, or combinations thereof. See, e.g., U.S. Pat. Nos. 4,130,641 and 4,024,222. A dsRNA polyriboinosinic acid:polyribocytidylic acid is described in U.S. Pat. No. 4,283,393. Methods for making and using dsRNA are known in the art. One method comprises the simultaneous transcription of two complementary DNA strands, either in vivo, or in a single in vitro reaction mixture. See, e.g., U.S. Pat. No. 5,795,715. In one embodiment, dsRNA can be introduced into a plant or plant cell directly by standard transformation procedures. Alternatively, dsRNA can be expressed in a plant cell by transcribing two complementary RNAs.

[0093] Other methods for the inhibition of endogenous gene expression, such as triple helix formation (Moser et al., 1987, Science 238:645-650 and Cooney et al., 1988, Science 241:456-459) and co-suppression (Napoli et al., 1990, The Plant Cell 2:279-289) are known in the art. Partial and full-length cDNAs have been used for the cosuppression of endogenous plant genes. See, e.g., U.S. Pat. Nos. 4,801,340, 5,034,323, 5,231,020, and 5,283,184; Van der Kroll et al., 1990, The Plant Cell 2:291-299; Smith et al., 1990, Mol. Gen. Genetics 224:477-481; and Napoli et al., 1990, The Plant Cell 2:279-289.

[0094] For sense suppression, it is believed that introduction of a sense polynucleotide blocks transcription of the corresponding target gene. The sense polynucleotide will have at least 65% sequence identity with the target plant gene or RNA. Preferably, the percent identity is at least 80%, 90%, 95%, or more. The introduced sense polynucleotide need not be full length relative to the target gene or transcript. Preferably, the sense polynucleotide will have at least 65% sequence identity with at least 100 consecutive nucleotides of any of SEQ ID NOS as provided in Column No. 3 of Table 1. The regions of identity can comprise introns and/or exons and untranslated regions. The introduced sense polynucleotide may be present in the plant cell transiently, or may be stably integrated into a plant chromosome or extrachromosomal replicon.

[0095] Alternatively, MTP gene expression can be inhibited by targeting nucleotide sequences complementary to the regulatory region of an MTP nucleotide sequence (e.g., an MTP promoter and/or enhancer) to form triple helical structures that prevent transcription of an MTP gene in target cells. See generally, Helene, C., 1991, Anticancer Drug Des. 6(6):569-84; Helene, C. et al., 1992, Ann. N.Y. Acad. Sci. 660:27-36; and Maher, L. J., 1992, Bioassays 14(12):807-15.

[0096] In addition to the MTP nucleic acids and polypeptides described above, the present invention encompasses these nucleic acids and polypeptides attached to a moiety. These moieties include, but are not limited to, detection moieties, hybridization moieties, purification moieties, delivery moieties, reaction moieties, binding moieties, and the like. A typical group of nucleic acids having moieties attached are probes and primers. Probes and primers typically comprise a substantially isolated oligonucleotide. The oligonucleotide typically comprises a region of nucleotide sequence that hybridizes under stringent conditions to at least about 12, preferably about 25, more preferably about 40, 50, or 75 consecutive nucleotides of a sense strand of the sequence set forth in any of SEQ ID NOS as provided in Column No. 3 of Table 1; an anti-sense sequence of the sequence set forth in any of SEQ ID NOS as provided in Column No. 3 of Table 1; or naturally occurring mutants thereof. Primers based on a nucleotide sequence of any of SEQ ID NOS as provided in Column No. 3 of Table 1 can be used in PCR reactions to clone MTP homologs. Probes based on the MTP nucleotide sequences can be used to detect transcripts or genomic sequences encoding the same or substantially identical polypeptides. In preferred embodiments, the probe further comprises a label group attached thereto, e.g. the label group can be a radioisotope, a fluorescent compound, an enzyme, or an enzyme co-factor. Such probes can be used as a part of a genomic marker test kit for identifying cells which express an MTP, such as by measuring a level of an MTP-encoding nucleic acid, in a sample of cells, e.g., detecting MTP mRNA levels or determining whether a genomic MTP gene has been mutated or deleted.

[0097] In particular, a useful method to ascertain the level of transcription of the gene (an indicator of the amount of mRNA available for translation to the gene product) is to perform a Northern blot (For reference, see, for example, Ausubel et al., 1988, Current Protocols in Molecular Biology, Wiley: New York). The information from a Northern blot at least partially demonstrates the degree of transcription of the transformed gene. Total cellular RNA can be prepared from cells, tissues, or organs by several methods, all well-known in the art, such as that described in Bormann, E. R. et al., 1992, Mol. Microbiol. 6:317-326. To assess the presence or relative quantity of polypeptide translated from this mRNA, standard techniques, such as a Western blot, may be employed. These techniques are well known to one of ordinary skill in the art. (See, for example, Ausubel et al., 1988, Current Protocols in Molecular Biology, Wiley: New York).

[0098] The invention further provides an isolated recombinant expression vector comprising an MTP nucleic acid, wherein expression of the vector in a host cell results in increased root growth, and/or yield, and/or tolerance to environmental stress as compared to a wild type variety of the host cell. As used herein, the term “vector” refers to a nucleic acid molecule capable of transporting another nucleic acid to which it has been linked. One type of vector is a “plasmid,” which refers to a circular double stranded DNA loop into which additional DNA segments can be ligated. Another type of vector is a viral vector, wherein additional DNA segments can be ligated into the viral genome. Certain vectors are capable of autonomous replication in a host cell into which they are introduced (e.g., bacterial vectors having a bacterial origin of replication and episomal mammalian vectors). Other vectors (e.g., non-episomal mammalian vectors) are integrated into the genome of a host cell upon introduction into the host cell, and thereby are replicated along with the host genome. Moreover, certain vectors are capable of directing the expression of genes to which they are operatively linked. Such vectors are referred to herein as “expression vectors.” In general, expression vectors of utility in recombinant DNA techniques are often in the form of plasmids. In the present specification, “plasmid” and “vector” can be used interchangeably as the plasmid is the most commonly used form of vector. However, the invention is intended to include such other forms of expression vectors, such as viral vectors (e.g., replication defective retroviruses, adenoviruses, and adeno-associated viruses), which serve equivalent functions.

[0099] The recombinant expression vectors of the invention comprise a nucleic acid of the invention in a form suitable for expression of the nucleic acid in a host cell, which means that the recombinant expression vectors include one or more regulatory sequences, selected on the basis of the host cells to be used for expression, which is operatively linked to the nucleic acid sequence to be expressed. As used herein with respect to a recombinant expression vector, “operatively linked” is intended to mean that the nucleotide sequence of interest is linked to the regulatory sequence(s) in a manner which allows for expression of the nucleotide sequence (e.g., in an in vitro transcription/translation system or in a host cell when the vector is introduced into the host cell). The term “regulatory sequence” is intended to include promoters, enhancers, and other expression control elements (e.g., polyadenylation signals). Such regulatory sequences are described, for example, in Goeddel, Gene Expression Technology: Methods in Enzymology 185, Academic Press, San Diego, Calif. (1990) and Gruber and Crosby, in: Methods in Plant Molecular Biology and Biotechnology, eds. Glick and Thompson, Chapter 7, 89-108, CRC Press: Boca Raton, Fla., including the references therein. Regulatory sequences include those that direct constitutive expression of a nucleotide sequence in many types of host cells and those that direct expression of the nucleotide sequence only in certain host cells or under certain conditions. It will be appreciated by those skilled in the art that the design of the expression vector can depend on such factors as the choice of the host cell to be transformed, the level of expression of polypeptide desired, etc. The expression vectors of the invention can be introduced into host cells to thereby produce polypeptides or peptides, including fusion polypeptides or peptides, encoded by nucleic acids as described herein (e.g., MTPs, mutant forms of MTPs, fusion polypeptides, etc.).

[0100] The recombinant expression vectors of the invention can be designed for expression of MTPs in prokaryotic or eukaryotic cells. For example, MTP genes can be expressed in bacterial cells such as C. glutamicum, insect cells (using baculovirus expression vectors), yeast and other fungal cells (See Romanos, M. A. et al., 1992, Foreign gene expression in yeast: a review, Yeast 8:423-488; van den Hondel, C. A. M. J. J. et al., 1991, Heterologous gene expression in filamentous fungi, in: More Gene Manipulations in Fungi, J. W. Bennet & L. L. Lasure, eds., p. 396-428: Academic Press: San Diego; and van den Hondel, C. A. M. J. J. & Punt, P. J., 1991, Gene transfer systems and vector development for filamentous fungi, in: Applied Molecular Genetics of Fungi, Peberdy, J. F. et al., eds., p. 1-28, Cambridge University Press: Cambridge), algae (Falciatore et al., 1999, Marine Biotechnology 1(3):239-251), ciliates of the types: Holotrichia, Peritrichia, Spirotrichia, Suctoria, Tetrahymena, Paramecium, Colpidium, Glaucoma, Platyophrya, Potomacus, Pseudocohnilembus, Euplotes, Engelmaniella, and Stylonychia, especially of the genus Stylonychia lemnae with vectors following a transformation method as described in PCT Application No. WO 98/01572, and multicellular plant cells (See Schmidt, R. and Willmitzer, L., 1988, High efficiency Agrobacterium tumefaciens-mediated transformation of Arabidopsis thaliana leaf and cotyledon explants, Plant Cell Rep. 583-586; Plant Molecular Biology and Biotechnology, C Press, Boca Raton, Fla., chapter 6/7, S.71-119 (1993); F. F. White, B. Jenes et al., Techniques for Gene Transfer, in: Transgenic Plants, Vol. 1, Engineering and Utilization, eds. Kung and R. Wu, 128-43, Academic Press: 1993; Potrykus, 1991, Arum. Rev. Plant Physiol. Plant Molec. Biol. 42:205-225 and references cited therein), or mammalian cells. Suitable host cells are discussed further in Goeddel, Gene Expression Technology Methods in Enzymology 185, Academic Press: San Diego, Calif. (1990). Alternatively, the recombinant expression vector can be transcribed and translated in vitro, for example using T7 promoter regulatory sequences and T7 polymerase.

[0101] Expression of polypeptides in prokaryotes is most often carried out with vectors containing constitutive or inducible promoters directing the expression of either fusion or non-fusion polypeptides. Fusion vectors add a number of amino acids to a polypeptide encoded therein, usually to the amino terminus of the recombinant polypeptide but also to the C-terminus or fused within suitable regions in the polypeptides. Such fusion vectors typically serve three purposes: 1) to increase expression of a recombinant polypeptide; 2) to increase the solubility of a recombinant polypeptide; and 3) to aid in the purification of a recombinant polypeptide by acting as a ligand in affinity purification. Often, in fusion expression vectors, a proteolytic cleavage site is introduced at the junction of the fusion moiety and the recombinant polypeptide to enable separation of the recombinant polypeptide from the fusion moiety subsequent to purification of the fusion polypeptide. Such enzymes, and their cognate recognition sequences, include Factor Xa, thrombin, and enterokinase.

[0102] Typical fusion expression vectors include pGEX (Pharmacia Biotech Inc; Smith, D. B. and Johnson, K. S., 1988, Gene 67:31-40), pMAL (New England Biolabs, Beverly, Mass.), and pRIT5 (Pharmacia, Piscataway, N.J.) which fuse glutathione S-transferase (GST), maltose E binding polypeptide, or polypeptide A, respectively, to the target recombinant polypeptide. In one embodiment, the coding sequence of the MTP is cloned into a pGEX expression vector to create a vector encoding a fusion polypeptide comprising, from the N-terminus to the C-terminus, GST-thrombin cleavage site-X polypeptide. The fusion polypeptide can be purified by affinity chromatography using glutathione-agarose resin. Recombinant MTP unfused to GST can be recovered by cleavage of the fusion polypeptide with thrombin.

[0103] Examples of suitable inducible non-fusion E. coli expression vectors include pTrc (Amann et al., 1988, Gene 69:301-315) and pET 11d (Studier et al., Gene Expression Technology: Methods in Enzymology 185, Academic Press, San Diego, Calif. (1990) 60-89). Target gene expression from the pTrc vector relies on host RNA polymerase transcription from a hybrid trp-lac fusion promoter. Target gene expression from the pET 11d vector relies on transcription from a T7 gn10-lac fusion promoter mediated by a co-expressed viral RNA polymerase (T7 gn1). This viral polymerase is supplied by host strains BL21(DE3) or HMS174(DE3) from a resident prophage harboring a T7 gn1 gene under the transcriptional control of the lacUV 5 promoter.

[0104] One strategy to maximize recombinant polypeptide expression is to express the polypeptide in a host bacterium with an impaired capacity to proteolytically cleave the recombinant polypeptide (Gottesman, S., Gene Expression Technology: Methods in Enzymology 185, Academic Press, San Diego, Calif. (1990) 119-128). Another strategy is to alter the sequence of the nucleic acid to be inserted into an expression vector so that the individual codons for each amino acid are those preferentially utilized in the bacterium chosen for expression, such as C. glutamicum (Wada et al., 1992, Nucleic Acids Res. 20:2111-2118). Such alteration of nucleic acid sequences of the invention can be carried out by standard DNA synthesis techniques.

[0105] In another embodiment, the MTP expression vector is a yeast expression vector. Examples of vectors for expression in yeast S. cerevisiae include pYepSec1 (Baldari, et al., 1987, EMBO J. 6:229-234), pMFa (Kurjan and Herskowitz, 1982, Cell 30:933-943), pJRY88 (Schultz et al., 1987, Gene 54:113-123), and pYES2 (Invitrogen Corporation, San Diego, Calif.). Vectors and methods for the construction of vectors appropriate for use in other fungi, such as the filamentous fungi, include those detailed in: van den Hondel, C. A. M. J. J. & Punt, P. J., 1991, “Gene transfer systems and vector development for filamentous fungi,” in: Applied Molecular Genetics of Fungi, J. F. Peberdy, et al., eds., p. 1-28, Cambridge University Press: Cambridge.

[0106] In a preferred embodiment of the present invention, the MTPs are expressed in plants and plants cells such as unicellular plant cells (e.g. algae) (See Falciatore et al., 1999, Marine Biotechnology 1(3):239-251 and references therein) and plant cells from higher plants (e.g., the spermatophytes, such as crop plants). AN MTP may be “introduced” into a plant cell by any means, including transfection, transformation or transduction, electroporation, particle bombardment, agroinfection, and the like. One transformation method known to those of skill in the art is the dipping of a flowering plant into an Agrobacteria solution, wherein the Agrobacteria contain the MTP nucleic acid, followed by breeding of the transformed gametes.

[0107] Other suitable methods for transforming or transfecting host cells including plant cells can be found in Sambrook, et al. (Molecular Cloning: A Laboratory Manual. latest ed., Cold Spring Harbor Laboratory, Cold Spring Harbor Laboratory Press, Cold Spring Harbor, N.Y., 1989) and other laboratory manuals such as Methods in Molecular Biology, 1995, Vol. 44, Agrobacterium protocols, ed: Gartland and Davey, Humana Press, Totowa, N.J. As increased growth and increased biotic and abiotic stress tolerance are general traits wished to be inherited into a wide variety of plants like maize, wheat, rye, oat, triticale, rice, barley, sorghum, millet, sugarcane, soybean, peanut, cotton, rapeseed and canola, manihot, pepper, sunflower and tagetes, solanaceous plants like potato, tobacco, eggplant, and tomato, Vicia species, pea, alfalfa, bushy plants (coffee, cacao, tea), Salix species, trees (oil palm, coconut), perennial grasses, and forage crops, these crop plants are also preferred target plants for a genetic engineering as one further embodiment of the present invention. Forage crops include, but are not limited to, Wheatgrass, Canarygrass, Bromegrass, Wildrye Grass, Bluegrass, Orchardgrass, Alfalfa, Salfoin, Birdsfoot Trefoil, Alsike Clover, Red Clover, and Sweet Clover.

[0108] In one embodiment of the present invention, transfection of an MTP into a plant is achieved by Agrobacterium mediated gene transfer. Agrobacterium mediated plant transformation can be performed using for example the GV3101(pMP90) (Koncz and Schell, 1986, Mol. Gen. Genet. 204:383-396) or LBA4404 (Clontech) Agrobacterium tumefaciens strain. Transformation can be performed by standard transformation and regeneration techniques (Deblaere et al., 1994, Nucl. Acids. Res. 13:4777-4788; Gelvin, Stanton B. and Schilperoort, Robert A, Plant Molecular Biology Manual, 2^{nd} Ed.—Dordrecht: Kluwer Academic Publ., 1995.—in Sect., Ringbuc Zentrale Signatur: BT11-P ISBN 0-7923-2731-4; Glick, Bernard R.; Thompson, John E., Methods in Plant Molecular Biology and Biotechnology, Boca Raton: CRC Press, 1993 360 S., ISBN 0-8493-5164-2). For example, rapeseed can be transformed via cotyledon or hypocotyl transformation (Moloney et al., 1989, Plant Cell Report 8:238-242; De Block et al., 1989, Plant Physiol. 91:694-701). Use of antibiotics for Agrobacterium and plant selection depends on the binary vector and the Agrobacterium strain used for transformation. Rapeseed selection is normally performed using kanamycin as the selectable plant marker. Agrobacterium mediated gene transfer to flax can be performed using, for example, a technique described by Mlynarova et al., 1994, Plant Cell Report 13:282-285. Additionally, transformation of soybean can be performed using for example a technique described in European Patent No. 0424 047, U.S. Pat. No. 5,322,783, European Patent No. 0397 687, U.S. Pat. No. 5,376,543, or U.S. Pat. No. 5,169,770. Transformation of maize can be achieved by particle bombardment, polyethylene glycol mediated DNA uptake, or via the silicon carbide fiber technique. (See, for example, Freeling and Walbot “The maize handbook” Springer Verlag: New York (1993) ISBN 3-540-97826-7). A specific example of maize transformation is found in U.S. Pat. No. 5,990,387, and a specific example of wheat transformation can be found in PCT Application No. WO 93/07256.

[0109] According to the present invention, the introduced MTP may be maintained in the plant cell stably if it is incorporated into a non-chromosomal autonomous replicon or integrated into the plant chromosomes. Alternatively, the introduced MTP may be present on an extra-chromosomal non-replicating vector and may be transiently expressed or transiently active.

[0110] In one embodiment, a homologous recombinant microorganism can be created wherein the MTP is integrated into a chromosome, a vector is prepared which contains at least a portion of an MTP gene into which a deletion, addition, or substitution has been introduced to thereby alter, e.g., functionally disrupt, the MTP gene. Preferably, the MTP gene is any of MTP genes as provided in Table 1, but it can be a homolog from a related plant or yeast, or even from a mammalian or insect source. In one embodiment, the vector is designed such that, upon homologous recombination, the endogenous MTP gene is functionally disrupted (i.e., no longer encodes a functional polypeptide; also referred to as a knock-out vector). Alternatively, the vector can be designed such that, upon homologous recombination, the endogenous MTP gene is mutated or otherwise altered but still encodes a functional polypeptide (e.g., the upstream regulatory region can be altered to thereby alter the expression of the endogenous MTP). To create a point mutation via homologous recombination, DNA-RNA hybrids can be used in a technique known as chimeraplasty (Cole-Strauss et al., 1999, Nucleic Acids Research 27(5):1323-1330 and Kmiec, 1999, Gene Therapy American Scientist 87(3):240-247). Homologous recombination procedures in Arabiodopsis thaliana, for example, are well known in the art and are contemplated for use herein.

[0111] Whereas in the homologous recombination vector, the altered portion of the MTP gene is flanked at its 5′ and 3′ ends by an additional nucleic acid molecule of the MTP gene to allow for homologous recombination to occur between the exogenous MTP gene carried by the vector and an endogenous MTP gene, in a microorganism or plant. The additional flanking MTP nucleic acid molecule is of sufficient length for successful homologous recombination with the endogenous gene. Typically, several hundreds of base pairs up to kilobases of flanking DNA (both at the 5′ and 3′ ends) are included in the vector (See e.g., Thomas, K. R., and Capecchi, M. R., 1987, Cell 51:503 for a description of homologous recombination vectors). The vector is introduced into a microorganism or plant cell (e.g., via polyethylene glycol mediated DNA), and cells in which the introduced MTP gene has homologously recombined with the endogenous MTP gene are selected using art-known techniques.

[0112] In another embodiment, recombinant microorganisms can be produced that contain selected systems that allow for regulated expression of the introduced gene. For example, inclusion of an MTP gene on a vector placing it under control of the lac operon permits expression of the MTP gene only in the presence of IPTG. Such regulatory systems are well known in the art.

[0113] Whether present in an extra-chromosomal non-replicating vector or a vector that is integrated into a chromosome, the MTP polynucleotide preferably resides in a plant expression cassette. A plant expression cassette preferably contains regulatory sequences capable of driving gene expression in plant cells that are operatively linked so that each sequence can fulfill its function, for example, termination of transcription by polyadenylation signals. Preferred polyadenylation signals are those originating from Agrobacterium tumefaciens t-DNA such as the gene 3 known as octopine synthase of the Ti-plasmid pTiACH5 (Gielen et al., 1984, EMBO J. 3:835) or functional equivalents thereof, but also all other terminators functionally active in plants are suitable. As plant gene expression is very often not limited on transcriptional levels, a plant expression cassette preferably contains other operatively linked sequences like translational enhancers such as the overdrive-sequence containing the 5′-untranslated leader sequence from tobacco mosaic virus enhancing the polypeptide per RNA ratio (Gallie et al., 1987, Nucl. Acids Research 15:8693-8711). Examples of plant expression vectors include those detailed in: Becker, D., Kemper, E., Schell, J. and Masterson, R., 1992, New plant binary vectors with selectable markers located proximal to the left border, Plant Mol. Biol. 20: 1195-1197; and Bevan, M. W., 1984, Binary Agrobacterium vectors for plant transformation, Nucl. Acid. Res. 12:8711-8721; Vectors for Gene Transfer in Higher Plants; in: Transgenic Plants, Vol. 1, Engineering and Utilization, eds.: Kung and R. Wu, Academic Press, 1993, S. 15-38.

[0114] Plant gene expression should be operatively linked to an appropriate promoter conferring gene expression in a timely, cell specific, or tissue specific manner. Promoters useful in the expression cassettes of the invention include any promoter that is capable of initiating transcription in a plant cell. Such promoters include, but are not limited to, those that can be obtained from plants, plant viruses, and bacteria that contain genes that are expressed in plants, such as Agrobacterium and Rhizobium.

[0115] The promoter may be constitutive, inducible, developmental stage-preferred, cell type-preferred, tissue-preferred, or organ-preferred. Constitutive promoters are active under most conditions. Examples of constitutive promoters include the CaMV 19S and 35S promoters (Odell et al., 1985, Nature 313:810-812), the sX CaMV 35S promoter (Kay et al., 1987, Science 236:1299-1302), the Sep1 promoter, the rice actin promoter (McElroy et al., 1990, Plant Cell 2:163-171), the Arabidopsis actin promoter, the ubiquitan promoter (Christensen et al., 1989, Plant Molec. Biol. 18:675-689), pEmu (Last et al., 1991, Theor. Appl. Genet. 81:581-588), the figwort mosaic virus 35S promoter, the Smas promoter (Velten et al., 1984, EMBO J. 3:2723-2730), the super-promoter (U.S. Pat. No. 5,955,646), the GRP1-8 promoter, the cinnamyl alcohol dehydrogenase promoter (U.S. Pat. No. 5,683,439), promoters from the T-DNA of Agrobacterium, such as mannopine synthase, nopaline synthase, and octopine synthase, the small subunit of ribulose biphosphate carboxylase (ssuRUBISCO) promoter, and the like.

[0116] Inducible promoters are preferentially active under certain environmental conditions, such as the presence or absence of a nutrient or metabolite, heat or cold, light, pathogen attack, anaerobic conditions, and the like. For example, the hsp80 promoter from Brassica is induced by heat shock; the PPDK promoter is induced by light; the PR-1 promoter from tobacco, Arabidopsis, and maize are inducible by infection with a pathogen; and the Adh1 promoter is induced by hypoxia and cold stress. Plant gene expression can also be facilitated via an inducible promoter (For review, see Gatz, 1997, Annu. Rev. Plant Physiol. Plant Mol. Biol. 48:89-108). Chemically inducible promoters are especially suitable if gene expression is wanted to occur in a time specific manner. Examples of such promoters are a salicylic acid inducible promoter (PCT Application No. WO 95/19443), a tetracycline inducible promoter (Gatz et al., 1992, Plant J. 2:397-404), and an ethanol inducible promoter (PCT Application No. WO 93/21334).

[0117] In one preferred embodiment of the present invention, the inducible promoter is a stress-inducible promoter. For the purposes of the invention, stress inducible promoters are preferentially active under one or more of the following stresses: sub-optimal conditions associated with salinity, drought, temperature, metal, chemical, pathogenic, and oxidative stresses. Stress inducible promoters include, but are not limited to, Cor78 (Chak et al., 2000, Planta 210:875-883; Hovath et al., 1993, Plant Physiol. 103:1047-1053), Cor15a (Artus et al., 1996, PNAS 93(23):13404-09), Rci2A (Medina et al., 2001, Plant Physiol. 125:1655-66; Nylander et al., 2001, Plant Mol. Biol. 45:341-52; Navarre and Goffeau, 2000, EMBO J. 19:2515-24; Capel et al., 1997, Plant Physiol. 115:569-76), Rd22 (Xiong et al., 2001, Plant Cell 13:2063-83; Abe et al., 1997, Plant Cell 9:1859-68; Iwasaki et al., 1995, Mol. Gen. Genet. 247:391-8), cDet6 (Lang and Palve, 1992, Plant Mol. Biol. 20:951-62), ADH1 (Hoeren et al., 1998, Genetics 149:479-90), KAT1 (Nakamura et al., 1995, Plant Physiol. 109:371-4), KST1 (Müller-Röber et al., 1995, EMBO 14:2409-16), Rha1 (Terryn et al., 1993, Plant Cell 5:1761-9; Terryn et al., 1992, FEBS Lett. 299(3):287-90), ARSK1 (Atkinson et al., 1997, GenBank Accession # L22302, and PCT Application No. WO 97/20057), PtxA (Plesch et al., GenBank Accession # X67427), SbHRGP3 (Ahn et al., 1996, Plant Cell 8:1477-90), GH3 (Liu et al., 1994, Plant Cell 6:645-57), the pathogen inducible PRP1-gene promoter (Ward et al., 1993, Plant. Mol. Biol. 22:361-366), the heat inducible hsp80-promoter from tomato (U.S. Pat. No. 5,187,267), cold inducible alpha-amylase promoter from potato (PCT Application No. WO 96/12814), or the wound-inducible pinII-promoter (European Patent No. 375091). For other examples of drought, cold, and salt-inducible promoters, such as the RD29A promoter, see Yamaguchi-Shinozalei et al., 1993, Mol. Gen. Genet. 236:331-340.

[0118] Developmental stage-preferred promoters are preferentially expressed at certain stages of development. Tissue and organ preferred promoters include those that are preferentially expressed in certain tissues or organs, such as leaves, roots, seeds, or xylem. Examples of tissue preferred and organ preferred promoters include, but are not limited to fruit-preferred, ovule-preferred, male tissue-preferred, seed-preferred, integument-preferred, tuber-preferred, stalk-preferred, pericarp-preferred, and leaf-preferred, stigma-preferred, pollen-preferred, anther-preferred, a petal-preferred, sepal-preferred, pedicel-preferred, silique-preferred, stem-preferred, root-preferred promoters, and the like. Seed preferred promoters are preferentially expressed during seed development and/or germination. For example, seed preferred promoters can be embryo-preferred, endosperm preferred, and seed coat-preferred. See Thompson et al., 1989, BioEssays 10:108. Examples of seed preferred promoters include, but are not limited to, cellulose synthase (celA), Cim1, gamma-zein, globulin-1, maize 19 kD zein (cZ19B1), and the like.

[0119] Other suitable tissue-preferred or organ-preferred promoters include the napin-gene promoter from rapeseed (U.S. Pat. No. 5,608,152), the USP-promoter from Vicia faba (Baeumlein et al., 1991, Mol. Gen. Genet. 225(3):459-67), the oleosin-promoter from Arabidopsis (PCT Application No. WO 98/45461), the phaseolin-promoter from Phaseolus vulgaris (U.S. Pat. No. 5,504,200), the Bce-4-promoter from Brassica (PCT Application No. WO 91/13980), or the legumin B4 promoter (LeB4; Baeumlein et al., 1992, Plant Journal, 2(2):233-9), as well as promoters conferring seed specific expression in monocot plants like maize, barley, wheat, rye, rice, etc. Suitable promoters to note are the lpt2 or lpt1-gene promoter from barley (PCT Application No. WO 95/15389 and PCT Application No. WO 95/23230) or those described in PCT Application No. WO 99/16890 (promoters from the barley hordein-gene, rice glutelin gene, rice oryzin gene, rice prolamin gene, wheat gliadin gene, wheat glutelin gene, oat glutelin gene, Sorghum kasirin-gene, and rye secalin gene).

[0120] Other promoters useful in the expression cassettes of the invention include, but are not limited to, the major chlorophyll a/b binding protein promoter, histone promoters, the Ap3 promoter, the β-conglycin promoter, the napin promoter, the soybean lectin promoter, the maize 15 kD zein promoter, the 22 kD zein promoter, the 27 kD zein promoter, the g-zein promoter, the waxy, shrunken 1, shrunken 2, and bronze promoters, the Zm13 promoter (U.S. Pat. No. 5,086,169), the maize polygalacturonase promoters (PG) (U.S. Pat. Nos. 5,412,085 and 5,545,546), and the SGB6 promoter (U.S. Pat. No. 5,470,359), as well as synthetic or other natural promoters.

[0121] Additional flexibility in controlling heterologous gene expression in plants may be obtained by using DNA binding domains and response elements from heterologous sources (i.e., DNA binding domains from non-plant sources). An example of such a heterologous DNA binding domain is the LexA DNA binding domain (Brent and Ptashne, 1985, Cell 43:729-736).

[0122] The invention further provides a recombinant expression vector comprising an MTP DNA molecule of the invention cloned into the expression vector in an antisense orientation. That is, the DNA molecule is operatively linked to a regulatory sequence in a manner that allows for expression (by transcription of the DNA molecule) of an RNA molecule that is antisense to an MTP mRNA. Regulatory sequences operatively linked to a nucleic acid molecule cloned in the antisense orientation can be chosen which direct the continuous expression of the antisense RNA molecule in a variety of cell types. For instance, viral promoters and/or enhancers, or regulatory sequences can be chosen which direct constitutive, tissue specific, or cell type specific expression of antisense RNA. The antisense expression vector can be in the form of a recombinant plasmid, phagemid, or attenuated virus wherein antisense nucleic acids are produced under the control of a high efficiency regulatory region. The activity of the regulatory region can be determined by the cell type into which the vector is introduced. For a discussion of the regulation of gene expression using antisense genes, see Weintraub, H. et al., 1986, Antisense RNA as a molecular tool for genetic analysis, Reviews—Trends in Genetics, Vol. 1(1), and Mol et al., 1990, FEBS Letters 268:427-430.

[0123] Another aspect of the invention pertains to host cells into which a recombinant expression vector of the invention has been introduced. The terms “host cell” and “recombinant host cell” are used interchangeably herein. It is understood that such terms refer not only to the particular subject cell but they also apply to the progeny or potential progeny of such a cell. Because certain modifications may occur in succeeding generations due to either mutation or environmental influences, such progeny may not, in fact, be identical to the parent cell, but are still included within the scope of the term as used herein. A host cell can be any prokaryotic or eukaryotic cell. For example, an MTP can be expressed in bacterial cells such as C. glutamicum, insect cells, fungal cells, or mammalian cells (such as Chinese hamster ovary cells (CHO) or COS cells), algae, ciliates, plant cells, fungi, or other microorganisms like C. glutamicum. Other suitable host cells are known to those skilled in the art.

[0124] A host cell of the invention, such as a prokaryotic or eukaryotic host cell in culture, can be used to produce (i.e., express) an MTP. Accordingly, the invention further provides methods for producing MTPs using the host cells of the invention. In one embodiment, the method comprises culturing the host cell of invention (into which a recombinant expression vector encoding an MTP has been introduced, or into which genome has been introduced a gene encoding a wild-type or altered MTP) in a suitable medium until the MTP is produced. In another embodiment, the method further comprises isolating MTPs from the medium or the host cell.

[0125] Another aspect of the invention pertains to isolated MTPs, and biologically active portions thereof. An “isolated” or “purified” polypeptide or biologically active portion thereof is free of some of the cellular material when produced by recombinant DNA techniques, or chemical precursors or other chemicals when chemically synthesized. The language “substantially free of cellular material” includes preparations of MTP in which the polypeptide is separated from some of the cellular components of the cells in which it is naturally or recombinantly produced. In one embodiment, the language “substantially free of cellular material” includes preparations of an MTP having less than about 30% (by dry weight) of non-MTP material (also referred to herein as a “contaminating polypeptide”), more preferably less than about 20% of non-MTP material, still more preferably less than about 10% of non-MTP material, and most preferably less than about 5% non-MTP material.

[0126] The nucleic acid molecules, polypeptides, polypeptide homologs, fusion polypeptides, primers, vectors, and host cells described herein can be used in one or more of the following methods: identification of any of the organisms as provided in Column No. 2 of Table 1 and related organisms; mapping of genomes of organisms related to any of the organisms as provided in Column No. 2 of Table 1; identification and localization of the sequences of interest of any of the organisms as provided in Column No. 2 of Table 1; evolutionary studies; determination of MTP regions required for function; modulation of an MTP activity; modulation of the metabolism of one or more cell functions; modulation of the transmembrane transport of one or more compounds; modulation of stress resistance; and modulation of expression of MTP nucleic acids. In one embodiment of these methods, the MTP functions as a membrane transporter.

[0127] The MTP nucleic acid molecules according to the invention have a variety of uses. Most importantly, the nucleic acid and amino acid sequences of the present invention can be used to transform plants, particularly crop plants, thereby inducing tolerance to stresses such as drought, high salinity, and cold. The present invention therefore provides a transgenic plant transformed by an MTP nucleic acid, wherein expression of the nucleic acid sequence in the plant results in increased root growth and/or tolerance to environmental stress as compared to a wild type variety of the plant. The transgenic plant can be a monocot or a dicot. The invention further provides that the transgenic plant can be selected from maize, wheat, rye, oat, triticale, rice, barley, sorghum, millet, sugarcane, soybean, peanut, cotton, rapeseed, canola, manihot, pepper, sunflower, tagetes, solanaceous plants, potato, tobacco, eggplant, tomato, Vicia species, pea, alfalfa, coffee, cacao, tea, Salix species, oil palm, coconut, perennial grass, and forage crops, for example.

[0128] In particular, the present invention describes using the expression of MTP coding nucleic acids to engineer plants with increased root growth, and/or increased yield, and/or that are drought-tolerant, salt-tolerant, and/or cold-tolerant. This strategy has herein been demonstrated using AtAGR1 (SEQ ID NO:1) in Arabidopsis thaliana and corn, but its application is not restricted to this gene or to these plants. Accordingly, the invention provides a transgenic crop plant containing an MTP as defined in any of SEQ ID NOS as provided in Column No. 4 of Table 1, wherein the plant has increased root growth, and/or increased yield, and/or increased tolerance to an environmental stress selected from one or more of the group consisting of drought, increased salt, or decreased or increased temperature. In preferred embodiments, the environmental stress is drought. In other preferred embodiments, the increased root growth is an increase in root length, preferably under water-limiting conditions.

[0129] The invention also provides a method of producing a transgenic crop plant containing an MTP coding nucleic acid, wherein expression of the nucleic acid(s) in the plant results in increased root growth, and/or increased yield, and/or increased tolerance to environmental stress as compared to a wild type variety of the plant comprising: (a) introducing into a plant cell an expression vector comprising an MTP nucleic acid, and (b) generating from the plant cell a transgenic plant with a increased root growth, and/or increased yield, and/or increased tolerance to environmental stress as compared to a wild type variety of the plant. The plant cell includes, but is not limited to, a protoplast, gamete producing cell, and a cell that regenerates into a whole plant. As used herein, the term “transgenic” refers to any plant, plant cell, callus, plant tissue, or plant part that contains all or part of at least one recombinant polynucleotide. In many cases, all or part of the recombinant polynucleotide is stably integrated into a chromosome or stable extra-chromosomal element, so that it is passed on to successive generations. In preferred embodiments, the MTP nucleic acid encodes a protein comprising the polypeptide of any of SEQ ID NOS as provided in Column No. 4 of Table 1.

[0130] The present invention also provides a method of modulating a plant's root growth, and/or yield, and/or tolerance to an environmental stress comprising, modifying the expression of an MTP coding nucleic acid in the plant. The plant's root growth, and/or yield, and/or tolerance to the environmental stress can be increased or decreased as achieved by increasing or decreasing the expression of an MTP, respectively. Preferably, the plant's root growth, and/or yield, and/or tolerance to the environmental stress is increased by increasing expression of an MTP. Expression of an MTP can be modified by any method known to those of skill in the art. The methods of increasing expression of MTPs can be used wherein the plant is either transgenic or not transgenic. In cases when the plant is transgenic, the plant can be transformed with a vector containing any of the above described MTP coding nucleic acids, or the plant can be transformed with a promoter that directs expression of native MTP in the plant, for example. The invention provides that such a promoter can be tissue preferred, developmentally regulated, stress inducible, or a combination thereof. Alternatively, non-transgenic plants can have native MTP expression modified by inducing a native promoter. The expression of MTP as defined in any of SEQ ID NOS as provided in Column No. 4 of Table 1 in target plants can be accomplished by, but is not limited to, one of the following examples: (a) constitutive promoter, (b) stress-inducible promoter, (c) chemical-induced promoter, and (d) engineered promoter overexpression with, for example, zinc-finger derived transcription factors (Greisman and Pabo, 1997, Science 275:657).

[0131] In a preferred embodiment, transcription of the MTP is modulated using zinc-finger derived transcription factors (ZFPs) as described in Greisman and Pabo, 1997, Science 275:657 and manufactured by Sangamo Biosciences, Inc. These ZFPs comprise both a DNA recognition domain and a functional domain that causes activation or repression of a target nucleic acid such as an MTP nucleic acid. Therefore, activating and repressing ZFPs can be created that specifically recognize the MTP promoters described above and used to increase or decrease MTP expression in a plant, thereby modulating the yield and/or stress tolerance of the plant. The present invention also includes identification of the homologs of MTP coding nucleic acids as defined in any of SEQ ID NOS as provided in Column No. 3 of Table 1 in a target plant, as well as the homolog's promoter. The invention also provides a method of increasing expression of a gene of interest within a host cell as compared to a wild type variety of the host cell, wherein the gene of interest is transcribed in response to an MTP, comprising: (a) transforming the host cell with an expression vector comprising an MTP coding nucleic acid, and (b) expressing the MTP within the host cell, thereby increasing the expression of the gene transcribed in response to the MTP, as compared to a wild type variety of the host cell.

[0132] In addition to introducing the MTP nucleic acid sequences into transgenic plants, these sequences can also be used to identify an organism as being any of the organisms as provided in Column No. 2 of Table 1, or a close relative thereof. Also, they may be used to identify the presence of any of the organisms as provided in Column No. 2 of Table 1, or a relative thereof in a mixed population of organisms. The invention relates to the nucleic acid sequences of a number of genes from any of the organisms as provided in Column No. 2 of Table 1; by probing the extracted genomic DNA of a culture of a unique or mixed population of organisms under stringent conditions with a probe spanning a region of a particular gene that is unique to the corresponding organism according to Table 1, one can ascertain whether this organism is present.

[0133] Further, the nucleic acid and polypeptide molecules according to the invention may serve as markers for specific regions of the genome. This has utility not only in the mapping of the genome, but also in functional studies of the polypeptides encoded by such genome. For example, to identify the region of the genome to which a particular organism's DNA-binding polypeptide binds, the organism's genome could be digested, and the fragments incubated with the DNA-binding polypeptide. Those fragments that bind the polypeptide may be additionally probed with the nucleic acid molecules of the invention, preferably with readily detectable labels. Binding of such a nucleic acid molecule to the genome fragment enables the localization of the fragment to the genome map of such an organism and, when performed multiple times with different enzymes, facilitates a rapid determination of the nucleic acid sequence to which the polypeptide binds. Further, the nucleic acid molecules of the invention may be sufficiently identical to the sequences of related species such that these nucleic acid molecules may serve as markers for the construction of a genomic map in related plants.

[0134] The MTP nucleic acid molecules of the invention are also useful for evolutionary and polypeptide structural studies. The membrane transporter processes in which the molecules of the invention participate are utilized by a wide variety of prokaryotic and eukaryotic cells; by comparing the sequences of the nucleic acid molecules of the present invention to those encoding similar enzymes from other organisms, the evolutionary relatedness of the organisms can be assessed. Similarly, such a comparison permits an assessment of which regions of the sequence are conserved and which are not, which may aid in determining those regions of the polypeptide that are essential for the functioning of the enzyme. This type of determination is of value for polypeptide engineering studies and may give an indication of what the polypeptide can tolerate in terms of mutagenesis without losing function.

[0135] Manipulation of the MTP nucleic acid molecules of the invention may result in the production of MTPs having functional differences from the wild-type MTPs. These polypeptides may be improved in efficiency or activity, may be present in greater numbers in the cell than is usual, or may be decreased in efficiency or activity.

[0136] There are a number of mechanisms by which the alteration of an MTP of the invention may directly affect root growth, and/or yield, and/or stress response and/or stress tolerance. In the case of plants expressing MTPs such as AGR1, AGR1 may act as an auxin efflux carrier protein in other cells in addition to cortical and epidermal cells of the elongation zone of the root, thereby improving the efficiency of auxin transport especially in the root, leading to an increase in root length and improved plant water use efficiency.

[0137] The effect of the genetic modification in plants, C. glutamicum, fungi, algae, or ciliates on root growth and/or stress tolerance can be assessed by growing the modified microorganism or plant under less than suitable conditions and then analyzing the growth characteristics and/or metabolism of the plant. Such analysis techniques are well known to one skilled in the art, and include dry weight, wet weight, polypeptide synthesis, carbohydrate synthesis, lipid synthesis, evapotranspiration rates, general plant and/or crop yield, flowering, reproduction, seed setting, root growth, respiration rates, photosynthesis rates, etc. (Applications of HPLC in Biochemistry in: Laboratory Techniques in Biochemistry and Molecular Biology, vol. 17; Rehm et al., 1993 Biotechnology, vol. 3, Chapter Product recovery and purification, page 469-714, VCH: Weinheim; Belter, P. A. et al., 1988, Bioseparations: downstream processing for biotechnology, John Wiley and Sons; Kennedy, J. F. and Cabral, J. M. S., 1992, Recovery processes for biological materials, John Wiley and Sons; Shaeiwitz, J. A. and Henry, J. D., 1988, Biochemical separations, in: Ulmann's Encyclopedia of Industrial Chemistry, vol. B3, Chapter 11, page 1-27, VCH: Weinheim; and Dechow, F. J., 1989, Separation and purification techniques in biotechnology, Noyes Publications).

[0138] For example, yeast expression vectors comprising the nucleic acids disclosed herein, or fragments thereof, can be constructed and transformed into Saccharomyces cerevisiae using standard protocols. The resulting transgenic cells can then be assayed for fail or alteration of their increased growth and/or tolerance to drought, salt, and temperature stresses. Similarly, plant expression vectors comprising the nucleic acids disclosed herein, or fragments thereof, can be constructed and transformed into an appropriate plant cell such as Arabidopsis, soy, rape, maize, wheat, Medicago truncatula, etc., using standard protocols. The resulting transgenic cells and/or plants derived there from can then be assayed for fail or alteration of their increased root growth and/or tolerance to drought, salt, and temperature stresses.

[0139] Additionally, the sequences disclosed herein, or fragments thereof, can be used to generate knockout mutations in the genomes of various organisms, such as bacteria, mammalian cells, yeast cells, and plant cells (Girke, T., 1998, The Plant Journal 15:39-48). The resultant knockout cells can then be evaluated for their ability or capacity to tolerate various stress conditions, their response to various stress conditions, and the effect on the phenotype and/or genotype of the mutation. For other methods of gene inactivation, see U.S. Pat. No. 6,004,804 “Non-Chimeric Mutational Vectors” and Puttaraju et al., 1999, Spliceosome-mediated RNA trans-splicing as a tool for gene therapy, Nature Biotechnology 17:246-252.

[0140] The aforementioned mutagenesis strategies for MTPs resulting in increased root growth, and/or yield, and/or stress tolerance are not meant to be limiting; variations on these strategies will be readily apparent to one skilled in the art. Using such strategies, and incorporating the mechanisms disclosed herein, the nucleic acid and polypeptide molecules of the invention may be utilized to generate algae, ciliates, plants, fungi, or other microorganisms like C. glutamicum expressing mutated MTP nucleic acid and polypeptide molecules such that the root growth and/or stress tolerance is improved.

[0141] The present invention also provides antibodies that specifically bind to an MTP, or a portion thereof, as encoded by a nucleic acid described herein. Antibodies can be made by many well-known methods (See, e.g., Harlow and Lane, “Antibodies; A Laboratory Manual,” Cold Spring Harbor Laboratory, Cold Spring Harbor, N.Y., (1988)). Briefly, purified antigen can be injected into an animal in an amount and in intervals sufficient to elicit an immune response. Antibodies can either be purified directly, or spleen cells can be obtained from the animal. The cells can then fused with an immortal cell line and screened for antibody secretion. The antibodies can be used to screen nucleic acid clone libraries for cells secreting the antigen. Those positive clones can then be sequenced. (See, for example, Kelly et al., 1992, Bio/Technology 10:163-167; Bebbington et al., 1992, Bio/Technology 10:169-175).

[0142] The phrases “selectively binds” and “specifically binds” with the polypeptide refer to a binding reaction that is determinative of the presence of the polypeptide in a heterogeneous population of polypeptides and other biologics. Thus, under designated immunoassay conditions, the specified antibodies bound to a particular polypeptide do not bind in a significant amount to other polypeptides present in the sample. Selective binding of an antibody under such conditions may require an antibody that is selected for its specificity for a particular polypeptide. A variety of immunoassay formats may be used to select antibodies that selectively bind with a particular polypeptide. For example, solid-phase ELISA immunoassays are routinely used to select antibodies selectively immunoreactive with a polypeptide. See Harlow and Lane, “Antibodies, A Laboratory Manual” Cold Spring Harbor Publications, New York, (1988), for a description of immunoassay formats and conditions that could be used to determine selective binding.

[0143] In some instances, it is desirable to prepare monoclonal antibodies from various hosts. A description of techniques for preparing such monoclonal antibodies may be found in Stites et al., eds., “Basic and Clinical Immunology,” (Lange Medical Publications, Los Altos, Calif., Fourth Edition) and references cited therein, and in Harlow and Lane “Antibodies, A Laboratory Manual” Cold Spring Harbor Publications, New York, 1988.

[0144] Throughout this application, various publications are referenced. The disclosures of all of these publications and those references cited within those publications in their entireties are hereby incorporated by reference into this application in order to more fully describe the state of the art to which this invention pertains.

[0145] It should also be understood that the foregoing relates to preferred embodiments of the present invention and that numerous changes may be made therein without departing from the scope of the invention. The invention is further illustrated by the following examples, which are not to be construed in any way as imposing limitations upon the scope thereof. On the contrary, it is to be clearly understood that resort may be had to various other embodiments, modifications, and equivalents thereof, which, after reading the description herein, may suggest themselves to those skilled in the art without departing from the spirit of the present invention and/or the scope of the appended claims.

### EXAMPLES

### Example 1

### Total DNA Isolation from Plant Material

[0146] The details for the isolation of total DNA relate to the working up of one gram fresh weight of plant material. The materials used include the following buffers: CTAB buffer: 2% (w/v) N-cethyl-N,N,N-trimethylammonium bromide (CTAB); 100 mM Tris HCl pH 8.0; 1.4 M NaCl; 20 mM EDTA; N-Laurylsarcosine buffer: 10% (w/v) N-laurylsarcosine; 100 mM Tris HCl pH 8.0; and 20 mM EDTA.

[0147] The plant material was triturated under liquid nitrogen in a mortar to give a fine powder and transferred to 2 ml Eppendorf vessels. The frozen plant material was then covered with a layer of 1 ml of decomposition buffer (1 ml CTAB buffer, 100 μl of N-laurylsarcosine buffer, 20 μl of β-mercaptoethanol, and 10 μl of proteinase K solution, 10 mg/ml) and incubated at 60° C. for one hour with continuous shaking. The homogenate obtained was distributed into two Eppendorf vessels (2 ml) and extracted twice by shaking with the same volume of chloroform/isoamyl alcohol (24:1). For phase separation, centrifugation was carried out at 8000×g and room temperature for 15 minutes in each case. The DNA was then precipitated at −70° C. for 30 minutes using ice-cold isopropanol. The precipitated DNA was sedimented at 4° C. and 10,000 g for 30 minutes and resuspended in 180 μl of TE buffer (Sambrook et al., 1989, Cold Spring Harbor Laboratory Press: ISBN 0-87969-309-6). For further purification, the DNA was treated with NaCl (1.2 M final concentration) and precipitated again at −70° C. for 30 minutes using twice the volume of absolute ethanol. After a washing step with 70% ethanol, the DNA was dried and subsequently taken up in 50 μl of H₂O+RNAse (50 mg/ml final concentration). The DNA was dissolved overnight at 4° C., and the RNAse digestion was subsequently carried out at 37° C. for 1 hour. Storage of the DNA took place at 4° C.

### Example 2

### Isolation of Total RNA and cDNA from Arabidopsis Plant Material

[0148] AtAGR1 was isolated by preparing RNA from Arabidopsis leaves using the RNA mini-isolation kit (Qiagen kit) following the manufacturer's recommendations. Reverse transcription reactions and amplification of the cDNA were performed as described below.
[0149] 1. Use 2 μl of RNA (0.5-2.0 μg) preparation in a 10 μl Dnase reaction, move the tube to 37° C. for 15 minutes, add 1 μl 25 mM EDTA, and then heat reaction to 65° C. for 15 minutes.

[0150] a. Buffer (10×: 200 mM Tris, 500 mM KCl, 20 mM MgCl₂)—1 μl

[0151] b. RNA—2 μl

[0152] c. Dnase (10 U/μl)—1 μl

[0153] d. H₂O—6 μl
[0154] 2. Use 1 μl of the above reaction in a room temperature reaction, and heat to 65° C. for 5 minutes.

[0155] a. Dnased RNA (0.025-0.1 μg depending on the starting amount)—1 μl

[0156] b. 10 mM dNTPs—1 μl

[0157] c. Primer (10 μM)—1 μl

[0158] d. H₂O—up to 10 μl
[0159] 3. Prepare a reaction mix with these reagents in a separate tube

[0160] a. SuperScript II RT buffer (10×)—2 μl

[0161] b. 25 mM MgCl₂—4 μl

[0162] c. DTT (0.1 M)—2 μl

[0163] d. Rnase Out Rnase Inhibitor (40 U/μl)—1 μl
[0164] 4. Add the 9 μl reaction mix to the denatured RNA solution, and hold at 42° C. for 2 minutes.
[0165] 5. Add 1 μl of SuperScriptII RT (50 U/μl), and incubate at 42° C. for 50 minutes.
[0166] 6. Terminate reaction at 70° C. for 15 minutes.
[0167] 7. Optional: add 1 μl of RNAseH to reaction to remove RNA.
[0168] 8. Perform PCR as you would using 1-2 μl of the new cDNA.
   Tissue Harvest, RNA Isolation, and cDNA Library Construction

[0169] Crop plants were grown under a variety of conditions and treatments, and different tissues were harvested at various developmental stages. Plant growth and harvesting were done in a strategic manner such that the probability of harvesting all expressable genes in at least one or more of the resulting libraries is maximized. The mRNA was isolated as described above from each of the collected samples, and cDNA libraries were constructed. No amplification steps were used in the library production process in order to minimize redundancy of genes within the sample and to retain expression information. All libraries were 3′ generated from mRNA purified on oligo dT columns. Colonies from the transformation of the cDNA library into E. coli were randomly picked and placed into microtiter plates.

PCR Amplification of cDNA Inserts and Spotting

[0170] The cDNA inserts from each clone from the microtiter plates were PCR amplified. Plasmid DNA was isolated from the E. coli colonies and then spotted on membranes. No purification step was necessary prior to spotting samples to nylon membranes.

### Example 3

### Cloning of AtAGR1

[0171] The cDNA isolated as described in Example 2 was used to clone the AtAGR1 gene by RT-PCR. The following primers were used: The forward primer was 5′-GGGGTCGACCAAAATGATCACCGGCAAAGAC-3′ (SEQ ID NO:126). The reverse primer was 5′-GGGTTAATTAACTTAAAGCCCCAAAAGAACGTA-3′ (SEQ ID NO:127). PCR reactions for the amplification included: 1×PCR buffer, 0.2 mM dNTP, 100 ng Arabidopsis thaliana DNA, 25 pmol reverse primer, 2.5 u Pfu or Herculase DNA polymerase.

[0172] PCR was performed according to standard conditions and to manufacturer's protocols (Sambrook et al., 1989, Molecular Cloning, A Laboratory Manual, 2nd Edition, Cold Spring Harbor Laboratory Press, Cold Spring Harbor, N.Y., Biometra T3 Thermocycler). The parameters for the reaction were: 1 cycle for 3 minutes at 94° C.; followed by 25 cycles of 30 seconds at 94° C., 30 seconds at 55° C., and 1.5 minutes at 72° C.

[0173] The amplified fragments were then extracted from agarose gel with a QIAquick Gel Extraction Kit (Qiagen) and ligated into the TOPO pCR 2.1 vector (Invitrogen) following manufacture's instructions. Recombinant vectors were transformed into Top 10 cells (Invitrogen) using standard conditions (Sambrook et al. 1989. Molecular Cloning, A Laboratory Manual, 2nd Edition, Cold Spring Harbor Laboratory Press, Cold Spring Harbor, N.Y.). Transformed cells were selected for on LB agar containing 100 μg/ml carbenicillin, 0.8 mg X-gal (5-bromo-4-chloro-3-indolyl-β-D-galactoside) and 0.8 mg IPTG (isopropylthio-β-D-galactoside) grown overnight at 37° C. White colonies were selected and used to inoculate 3 ml of liquid LB containing 100 μg/ml ampicillin and grown overnight at 37° C. Plasmid DNA was extracted using the QIAprep Spin Miniprep Kit (Qiagen) following manufacture's instructions. Analyses of subsequent clones and restriction mapping were performed according to standard molecular biology techniques (Sambrook et al., 1989, Molecular Cloning, A Laboratory Manual, 2nd Edition, Cold Spring Harbor Laboratory Press, Cold Spring Harbor, N.Y.).

[0174] The clones were sequenced, which confirmed that the identity of the cloned gene was identical to the sequence deposited in the Arabidopsis thaliana database (SEQ ID NO:1). The deduced amino acid sequence of AtAGR1 is shown at SEQ ID NO:2.

[0175] The AtAGR1 gene was then cloned into a binary vector and expressed under the Superpromoter (FIG. 3). The Superpromoter is constitutive, but root preferential (U.S. Pat. Nos. 5,428,147 and 5,217,903).

### Example 4

### Arabidopsis Plant Transformation

[0176] Transgenic Arabidopsis thaliana (Col) plants were generated by the dipping infiltration method (Bechtold et al., 1993, “In planta Agrobacterium-mediated gene transfer by infiltration of adult Arabidopsis thaliana plants,” C. R. Acad. Sci. Paris Life Sci. 316:1194-1199). The binary vectors were transformed into Agrobacteria strain C58C1 or pMP90 using electroporation. Culture of the transformed Agrobacteria was grown, and the bacteria was resuspended in dipping infiltration media (½ MS, 5% sucrose, 0.5 mg/ml MES, pH 5.7 and with 200 ppm Silwet L-77 (Lehle Seeds) added.) Each culture was used to transform 3 pots of approximately 5 week-old Col0 Arabidopsis plants by dipping pots 5 minutes each in resuspended Agrobacterium cultures. The plants were then grown to seed under standard Arabidopsis conditions (23° C. day/20° C. night, 18 hour day and 65% humidity). T1 seeds were screened on MS plates using 100 nM Pursuit (BASF).

### Screening of Transformed Plants

[0177] T1 seeds were sterilized according to standard protocols (Xiong et al., 1999, Plant Molecular Biology Reporter 17: 159-170). Seeds were selected on ½ Murashige and Skoog media (MS) (Sigma-Aldrich), 0.6% agar and supplemented with 1% sucrose, and 2 μg/ml benomyl (Sigma-Aldrich). Seeds on plates were vernalized for four days at 4° C. The seeds were germinated in a climatic chamber at an air temperature of 22° C. and light intensity of 40 micromols^{-1m2} (white light; Philips TL 65W/25 fluorescent tube) and 16 hours light and 8 hours dark day length cycle. Transformed seedlings were selected after 14 days and transferred to ½ MS media supplemented with 0.6% agar, 1% sucrose, and allowed to recover for five to seven days.

[0178] Seeds of T2 generation were used for plant root analysis in soil and in vitro.

### Example 5

### In Vitro Root Analysis of Transformed Arabidopsis Plants

[0179] For in vitro root analysis of transformed plants, square plates measuring 12 cm×12 cm were used. For each plate, 52 ml of MS media (0.5×MS salts, 0.5% sucrose, 0.5 g/L MES buffer, 1% Phytagar) without selection was used. Plates were allowed to dry in the sterile hood for one hour to reduce future condensation.

[0180] Seed aliquots were sterilized in glass vials with ethanol for 5 minutes, the ethanol was removed, and the seeds were allowed to dry in the sterile hood for one hour. Seeds were spotted in the plates using the Vacuseed Device (Lehle). In the experimental design, every plate contained both wild type and AtAGR1 transgenic plants. Therefore, every line was always compared to the controls grown in the same plate(s) to account for microenvironment variation. After the seeds were spotted on the plates, the plates were wrapped with Ventwrap and placed vertically in racks in the dark at 4° C. for four days to stratify the seeds. The plates were transferred to a C5 Percival Growth Chamber and placed vertically for 14 days. The growth chamber conditions were 23° C. day/21° C. night and 16 hour days/8 hour nights.

[0181] For data collection a high resolution flat-bed scanner was used. Analysis of the roots was done using the WinRhizo software package.

[0182] For in vitro analysis, roots were measured as length of the primary root at 14 days after germination. This corresponds to a 4 to 6 leaf stage in the Arabidopsis ecotype Columbia. Any difference observed could indicate a growth rate difference in the root growth, but could also reflect the final root growth.

[0183] The results of these experiments were also analyzed at the gene level. To do this, root length of all plants for all transgenic lines was averaged and compared against the average of the wild type plants. Presence of the transgene and copy number of the events were determined targeting the NOS terminator in real time PCR. The NOS Primers used for the analysis were: Forward primer 5′-TCCCCGATCGTTCAAACATT-3′ (SEQ ID NO:128), Reverse primer 5′-CCATCTCATAAATAACGTCATGCAT-3′ (SEQ ID NO:129). The reactions were run in a 96-well optical plate (Applied Biosystems, 4314320), and the endogenous control and gene of interest reactions were run on the same plate simultaneously. A master mix was made for both primer sets. The master mixes and the 96-well plate for assay should be kept on ice. Calculations are included for 52 reactions, which is suitable for half of the plate with use of a multichannel pipetter. The Eurogentec kit, (cat#RTSNRT032X-1) was used, and reactions were prepared using manufacturer's recommendations. A GeneAmp 5700 was used to run the reactions and collect data.

### Results

[0184] Our results show that transgenic AtAGR1 plants evaluated in plates have a longer root phenotype. FIG. 4A shows the results of the plants grown in vertical plates on a per line basis. The majority of AtAGR1 transgenic lines screened exhibited a longer root phenotype in comparison to wild-type control plant roots. The phenotype was more clearly observed in lines 5, 7, 9, 10, and 11.

[0185] The gene level analysis of the AtAGR1 transgenic plants, as seen in FIG. 4B, confirmed that the AtAGR1 plants exhibited an increased root length phenotype. Based on this analysis, AGR1 transgenic Arabidopsis plants exhibited a 29.3% increase in root length.

### Example 6

### Soil Root Analysis of Transformed Arabidopsis Plants

[0186] For soil root analysis, seeds were imbibed at 4° C. for 2 days in water and were planted directly in soil with no selection. Deepots (Hummert D40) were used with a saturated peat pellet (Jiffy 727) at the base and filled with water saturated Metromix. After planting, pots were covered with plastic wrap to prevent drying. Plants were grown using only water present at media preparation, as the water in the soil in these large pots is sufficient for 3 weeks of growth, and encourages rapid root growth. The plastic wrapping of the pots was removed after 12 days and morphological data was documented. At day 17 the aerial parts of the plant were harvested, dried at 65° C. for 2 days and the dry weight was measured. To examine the roots, the peat pellet was pushed towards the top of the pot to remove the soil and roots as a unit. The soil was then separated from the roots in a tray and the maximum root length was measured.

[0187] To determine the impact of the root phenotype in the above ground tissues of the transgenic plants, the dry weight of the rosette was measured and compared against the wild type plants.

### Results

[0188] Roots of the AtAGR1 lines were also evaluated in soil as described above. The results indicated transgenic plants exhibited a longer root phenotype when plants are grown in soil (FIGS. 5 and 6). In general, all AtAGR1 lines analyzed exhibited increased growth in the soil-based assay. Lines 4, 7, 8, 9, 10 and 11 showed the greatest increase in root length (FIG. 5). FIG. 6 shows the ANOVA of the overall performance of the AtAGR1 gene, demonstrating that the AtAGR1 transgenic plants performed significantly better than the wild type controls.

[0189] The dry weight of the rosette was measured, and the ANOVA analysis of the results is shown in FIG. 7. No significant differences were observed between the transgenic plants and the wild type controls. Therefore the rosette biomass does not appear to be affected by the over-expression of the AtAGR1 gene.

### Example 7

### Identification of Homologs to AtAGR1

[0190] The algorithms used in the present invention include: FASTA (Very sensitive sequence database searches with estimates of statistical significance; Pearson, 1990, Rapid and sensitive sequence comparison with FASTP and FASTA, Methods Enzymol. 183:63-98); BLAST (Very sensitive sequence database searches with estimates of statistical significance; Altschul et al., Basic local alignment search tool, Journal of Molecular Biology 215:403-10); PREDATOR (High-accuracy secondary structure prediction from single and multiple sequences; Frishman and Argos, 1997, 75% accuracy in protein secondary structure prediction. Proteins 27:329-335); CLUSTALW (Multiple sequence alignment; Thompson et al., 1994, CLUSTAL W (improving the sensitivity of progressive multiple sequence alignment through sequence weighting, positions-specific gap penalties and weight matrix choice), Nucleic Acids Research 22:4673-4680); TMAP (Transmembrane region prediction from multiply aligned sequences; Persson and Argos, 1994, Prediction of transmembrane segments in proteins utilizing multiple sequence alignments, J. Mol. Biol. 237:182-192); ALOM2 (Transmembrane region prediction from single sequences; Klein et al., Prediction of protein function from sequence properties: A discriminate analysis of a database. Biochim. Biophys. Acta 787:221-226 (1984). Version 2 by Dr. K. Nakai); PROSEARCH (Detection of PROSITE protein sequence patterns; Kolakowski et al., 1992, ProSearch: fast searching of protein sequences with regular expression patterns related to protein structure and function. Biotechniques 13, 919-921); BLIMPS (Similarity searches against a database of ungapped blocks, Wallace and Henikoff, 1992); PATMAT (a searching and extraction program for sequence, pattern and block queries and databases, CABIOS 8:249-254. Written by Bill Alford).

[0191] Homologs of the AtAGR1 gene were found in the public and proprietary databases. These homologs were evaluated to determine the level of relationship to AtAGR1. The tblastn program from the BLAST family of algorithms was used to compare the AtAGR1 protein sequence against the proprietary crop database translated in all six reading frames. Sequences with significant homology were found in each crop library. The sequence identity percentage at amino acid level of each sequence as compared to AtAGR1 is shown in Column No. 5 of Table 1.

### Example 8

### Engineering Soybean Plants by Over-Expressing the AGR1 Gene

[0192] Seeds of soybean are surface sterilized with 70% ethanol for 4 minutes at room temperature with continuous shaking, followed by 20% (v/v) CLOROX supplemented with 0.05% (v/v) TWEEN for 20 minutes with continuous shaking. Then, the seeds are rinsed 4 times with distilled water and placed on moistened sterile filter paper in a Petri dish at room temperature for 6 to 39 hours. The seed coats are peeled off, and cotyledons are detached from the embryo axis. The embryo axis is examined to make sure that the meristematic region is not damaged. The excised embryo axes are collected in a half-open sterile Petri dish and air-dried to a moisture content less than 20% (fresh weight) in a sealed Petri dish until further use.

[0193] Agrobacterium tumefaciens culture is prepared from a single colony in LB solid medium plus appropriate selection agents followed by growth of the single colony in liquid LB medium to an optical density at 600 nm of 0.8. Then, the bacteria culture is pelleted at 7000 rpm for 7 minutes at room temperature, and resuspended in MS medium supplemented with 100 μM acetosyringone. Bacteria cultures are incubated in this pre-induction medium for 2 hours at room temperature before use. The axis of soybean zygotic seed embryos at approximately 15% moisture content are imbibed for 2 hours at room temperature with the pre-induced Agrobacterium suspension culture. The embryos are removed from the imbibition culture and are transferred to Petri dishes containing solid MS medium supplemented with 2% sucrose and incubated for 2 days in the dark at room temperature. Alternatively, the embryos are placed on top of moistened (liquid MS medium) sterile filter paper in a Petri dish and incubated under the same conditions described above. After this period, the embryos are transferred to either solid or liquid MS medium supplemented with 500 mg/L carbenicillin or 300 mg/L cefotaxime to kill the Agrobacteria. The liquid medium is used to moisten the sterile filter paper. The embryos are incubated during 4 weeks at 25° C., under 150 μmol m⁻²sec⁻¹ and 12 hours photoperiod. Once the seedlings produce roots, they are transferred to sterile metromix soil. The medium of the in vitro plants is washed off before transferring the plants to soil. The plants are kept under a plastic cover for 1 week to favor the acclimatization process. Then the plants are transferred to a growth room where they are incubated at 25° C., under 150 μmol m⁻²sec⁻¹ light intensity and 12 hours photoperiod for about 80 days.

[0194] The transgenic plants are screened for their improved root growth and/or stress tolerance, demonstrating that transgene expression confers increased root growth, stress tolerance, and/or increased water use efficiency.

### Example 9

### Engineering Rapeseed/Canola Plants by Overexpressing the AGR1Gene

[0195] The method of plant transformation described herein is applicable to Brassica and other crops. Seeds of canola are surface sterilized with 70% ethanol for 4 minutes at room temperature with continuous shaking, followed by 20% (v/v) CLOROX supplemented with 0.05% (v/v) TWEEN for 20 minutes, at room temperature with continuous shaking. Then, the seeds are rinsed 4 times with distilled water and placed on moistened sterile filter paper in a Petri dish at room temperature for 18 hours. Then the seed coats are removed, and the seeds are air dried overnight in a half-open sterile Petri dish. During this period, the seeds lose approximately 85% of their water content. The seeds are then stored at room temperature in a sealed Petri dish until further use. DNA constructs and embryo imbibition are as described in Example 10. Samples of the primary transgenic plants (T0) are analyzed by PCR to confirm the presence of T-DNA. These results are confirmed by Southern hybridization in which DNA is electrophoresed on a 1% agarose gel and transferred to a positively charged nylon membrane (Roche Diagnostics). The PCR DIG Probe Synthesis Kit (Roche Diagnostics) is used to prepare a digoxigenin-labelled probe by PCR, and used as recommended by the manufacturer.

[0196] The transgenic plants are screened for their improved root growth and/or stress tolerance, demonstrating that transgene expression confers increased root growth, stress tolerance, and/or increased water use efficiency.

### Example 10

### Engineering Corn Plants by Overexpressing the AGR1 Gene

[0197] Transformation of maize (Zea Mays L.) with the gene of interest is performed with the method described by Ishida et al., 1996, Nature Biotech. 14745-50. Immature embryos are co-cultivated with Agrobacterium tumefaciens that carry “super binary” vectors, and transgenic plants are recovered through organogenesis. This procedure provides a transformation efficiency of between 2.5% and 20%. The transgenic plants are screened for their improved root growth and/or stress tolerance, demonstrating that transgene expression confers increased root growth, stress tolerance, and/or increased water use efficiency.

### Example 11

### Engineering Rice Plants by Overexpressing the AGR1 Gene

[0198] Transformation of rice with the gene of interest can be undertaken by direct gene transfer techniques utilizing protoplasts or particle bombardment. Protoplast-mediated transformation has been described for Japonica-types and Indica-types (Zhang et al., Plant Cell Rep 7: 379-384 (1988); Shimamoto et al. Nature 338: 274-277 (1989); Datta et al. Biotechnology 8: 736-740 (1990)). Both types are also routinely transformable using particle bombardment (Christou et al. Biotechnology 9: 957-962 (1991)). The transgenic plants are screened for their improved growth and/or stress tolerance, demonstrating that transgene expression confers increased root growth, stress tolerance, and/or increased water use efficiency.

### Example 12

### Identification of Homologous and Heterologous Genes

[0199] Gene sequences can be used to identify homologous or heterologous genes from cDNA or genomic libraries. Homologous genes (e.g. full-length cDNA clones) can be isolated via nucleic acid hybridization using for example cDNA libraries. Depending on the abundance of the gene of interest, 100,000 up to 1,000,000 recombinant bacteriophages are plated and transferred to nylon membranes. After denaturation with alkali, DNA is immobilized on the membrane by, e.g., UV cross linking. Hybridization is carried out at high stringency conditions. In aqueous solution, hybridization and washing is performed at an ionic strength of 1 M NaCl and a temperature of 68° C. Hybridization probes are generated by, e.g., radioactive (³²P) nick transcription labeling (High Prime, Roche, Mannheim, Germany). Signals are detected by autoradiography.

[0200] Partially homologous or heterologous genes that are related but not identical can be identified in a manner analogous to the above-described procedure using low stringency hybridization and washing conditions. For aqueous hybridization, the ionic strength is normally kept at 1 M NaCl while the temperature is progressively lowered from 68 to 42° C.

[0201] Isolation of gene sequences with homologies (or sequence identity/similarity) only in a distinct domain of (for example 10-20 amino acids) can be carried out by using synthetic radio labeled oligonucleotide probes. Radiolabeled oligonucleotides are prepared by phosphorylation of the 5-prime end of two complementary oligonucleotides with T4 polynucleotide kinase. The complementary oligonucleotides are annealed and ligated to form concatemers. The double stranded concatemers are then radiolabeled by, for example, nick transcription. Hybridization is normally performed at low stringency conditions using high oligonucleotide concentrations.

### Oligonucleotide Hybridization Solution:

[0202] 6×SSC
[0203] 0.01 M sodium phosphate
[0204] 1 mM EDTA (pH 8)
[0205] 0.5% SDS
[0206] 100 μg/ml denatured salmon sperm DNA
[0207] 0.1% nonfat dried milk

[0208] During hybridization, the temperature is lowered stepwise to 5-10° C. below the estimated oligonucleotide Tₘ, or down to room temperature, followed by washing steps and autoradiography. Washing is performed with low stringency, such as 3 washing steps using 4×SSC. Further details are described by Sambrook, J. et al., 1989, “Molecular Cloning: A Laboratory Manual”, Cold Spring Harbor Laboratory Press or Ausubel, F. M. et al., 1994, “Current Protocols in Molecular Biology”, John Wiley & Sons.

### Example 13

### Identification of Homologous Genes by Screening Expression Libraries with Antibodies

[0209] c-DNA clones can be used to produce recombinant protein for example in E. coli (e.g. Qiagen QIAexpress pQE system). Recombinant proteins are then normally affinity purified via Ni-NTA affinity chromatography (Qiagen). Recombinant proteins are then used to produce specific antibodies for example by using standard techniques for rabbit immunization. Antibodies are affinity purified using a Ni-NTA column saturated with the recombinant antigen as described by Gu et al., 1994, BioTechniques 17:257-262. The antibody can be used to screen expression cDNA libraries to identify homologous or heterologous genes via an immunological screening (Sambrook, J. et al., 1989, “Molecular Cloning: A Laboratory Manual”, Cold Spring Harbor Laboratory Press or Ausubel, F. M. et al., 1994, “Current Protocols in Molecular Biology”, John Wiley & Sons).

### Example 14

### In Vivo Mutagenesis

[0210] In vivo mutagenesis of microorganisms can be performed by passage of plasmid (or other vector) DNA through E. coli or other microorganisms (e.g. Bacillus spp. or yeasts such as Saccharomyces cerevisiae) which are impaired in their capabilities to maintain the integrity of their genetic information. Typical mutator strains have mutations in the genes for the DNA repair system (e.g., mutHLS, mutD, mutT, etc.; for reference, see Rupp, W. D., 1996, DNA repair mechanisms, in: Escherichia coli and Salmonella, p. 2277-2294, ASM: Washington.) Such strains are well known to those skilled in the art. The use of such strains is illustrated, for example, in Greener, A. and Callahan, M., 1994, Strategies 7:32-34. Transfer of mutated DNA molecules into plants is preferably done after selection and testing in microorganisms. Transgenic plants are generated according to various examples within the exemplification of this document.

### Example 15

### In Vitro Analysis of the Function of Arabidopsis Genes in Transgenic Organisms

[0211] The determination of activities and kinetic parameters of enzymes is well established in the art. Experiments to determine the activity of any given altered enzyme must be tailored to the specific activity of the wild-type enzyme, which is well within the ability of one skilled in the art. Overviews about enzymes in general, as well as specific details concerning structure, kinetics, principles, methods, applications, and examples for the determination of many enzyme activities may be found, for example, in the following references: Dixon, M., and Webb, E. C., 1979, Enzymes. Longmans: London; Fersht, 1985, Enzyme Structure and Mechanism. Freeman: New York; Walsh, 1979, Enzymatic Reaction Mechanisms. Freeman: San Francisco; Price, N. C., Stevens, L., 1982, Fundamentals of Enzymology. Oxford Univ. Press: Oxford; Boyer, P. D., ed., 1983, The Enzymes, 3rd ed. Academic Press: New York; Bisswanger, H., 1994, Enzymkinetik, 2^{nd} ed. VCH: Weinheim (ISBN 3527300325); Bergmeyer, H. U., Bergmeyer, J., Graβ1, M., eds., 1983-1986, Methods of Enzymatic Analysis, 3^{rd} ed., vol. Verlag Chemie: Weinheim; and Ullmann's Encyclopedia of Industrial Chemistry, 1987, vol. A9, Enzymes. VCH: Weinheim, p. 352-363.

[0212] The activity of proteins which bind to DNA can be measured by several well-established methods, such as DNA band-shift assays (also called gel retardation assays). The effect of such proteins on the expression of other molecules can be measured using reporter gene assays (such as that described in Kolmar, H. et al., 1995, EMBO J. 14: 3895-3904 and references cited therein). Reporter gene test systems are well known and established for applications in both pro- and eukaryotic cells, using enzymes such as β-galactosidase, green fluorescent protein, and several others.

[0213] The determination of activity of membrane-transport proteins can be performed according to techniques such as those described in Gennis, R. B., 1989, Pores, Channels and Transporters, in Biomembranes, Molecular Structure and Function, pp. 85-137, 199-234 and 270-322, Springer: Heidelberg.

### Example 16

### Purification of the Desired Product from Transformed Organisms

[0214] Recovery of the desired product from plant material, fungi, algae, ciliates, C. glutamicum cells, or other bacterial cells transformed with the nucleic acid sequences described herein, or the supernatant of the above-described cultures can be performed by various methods well known in the art. If the desired product is not secreted from the cells, the cells can be harvested from the culture by low-speed centrifugation, and the cells can be lysed by standard techniques, such as mechanical force or sonification. Organs of plants can be separated mechanically from other tissue or organs. Following homogenization, cellular debris is removed by centrifugation, and the supernatant fraction containing the soluble proteins is retained for further purification of the desired compound. If the product is secreted from desired cells, then the cells are removed from the culture by low-speed centrifugation, and the supernate fraction is retained for further purification.

[0215] The supernatant fraction from either purification method is subjected to chromatography with a suitable resin, in which the desired molecule is either retained on a chromatography resin while many of the impurities in the sample are not, or where the impurities are retained by the resin while the sample is not. Such chromatography steps may be repeated as necessary, using the same or different chromatography resins. One skilled in the art would be well-versed in the selection of appropriate chromatography resins and in their most efficacious application for a particular molecule to be purified. The purified product may be concentrated by filtration or ultrafiltration, and stored at a temperature at which the stability of the product is maximized.

[0216] There is a wide array of purification methods known to the art and the preceding method of purification is not meant to be limiting. Such purification techniques are described, for example, in Bailey, J. E. & Ollis, 1986, D. F. Biochemical Engineering Fundamentals, McGraw-Hill: New York. Additionally, the identity and purity of the isolated compounds may be assessed by techniques standard in the art. These include high-performance liquid chromatography (HPLC), spectroscopic methods, staining methods, thin layer chromatography, NIRS, enzymatic assay, or microbiologically. Such analysis methods are reviewed in: Patek et al., 1994, Appl. Environ. Microbiol. 60:133-140; Malakhova et al., 1996, Biotekhnologiya 11:27-32; and Schmidt et al., 1998, Bioprocess Engineer. 19:67-70; Ulmann's Encyclopedia of Industrial Chemistry, 1996, vol. A27, VCH: Weinheim, p. 89-90, p. 521-540, p. 540-547, p. 559-566, 575-581, and p. 581-587; Michal, G., 1999, Biochemical Pathways: An Atlas of Biochemistry and Molecular Biology, John Wiley and Sons; Fallon, A. et al., 1987, Applications of HPLC in Biochemistry in: Laboratory Techniques in Biochemistry and Molecular Biology, vol. 17.

### Example 17

### Salt Tolerance Screening

### Salt Test on MS Plate

[0217] Seedlings are transferred to filter paper soaked in ½ MS and placed on ½ MS 0.6% agar supplemented with 2 ug/ml benomyl the night before the stress screening. For the stress screening, the filter paper with the seedlings is moved to stacks of sterile filter paper, soaked in 50 mM NaCl, in a petri dish. After two hours, the filter paper with the seedlings is moved to stacks of sterile filter paper, soaked with 200 mM NaCl, in a petri dish. After two hours, the filter paper with the seedlings is moved to stacks of sterile filter paper, soaked in 600 mM NaCl, in a petri dish. After 10 hours, the seedlings are moved to petri dishes containing ½ MS 0.6% agar supplemented with 2 ug/ml benomyl. The seedlings are scored after 5 days, demonstrating that transgene expression confers salt tolerance.

### Soil Test for Salt Tolerance

[0218] Seeds of plants to be tested are sterilized (100% bleach, 0.1% TritonX for five minutes two times and rinsed five times with ddH2O). Seeds are plated on non-selection media (½ MS, 0.6% phytagar, 0.5 g/L MES, 1% sucrose, 2 μg/mlbenamyl).

[0219] Seeds are allowed to germinate for approximately ten days. At the 4-5 leaf stage, transgenic plants are potted into 5.5 cm diameter pots filled with loosely packed soil (Metromix 360, Scotts) wetted with 1 g/L 20-20-20 fertilizer (Peters Professional, Scotts).

[0220] The plants are allowed to grow (22° C., continuous light) for approximately seven days, watering as needed. When the plants are just about to bolt, the water is removed from the tray and the assay is started. To begin the assay, three liters of 100 mM NaCl and ⅛ MS is added to the tray under the pots. To the tray containing the control plants, three liters of ⅛ MS is added. After 10 days, the NaCl treated and the control plants are given water. Ten days later, the plants are photographed.

### Example 18

### Drought Tolerance Screening

[0221] T1 and T2 seedlings are transferred to dry, sterile filter paper in a petri dish and allowed to desiccate for two hours at 80% RH (relative humidity) in a Sanyo Growth Cabinet MLR-350H, micromols^{-1m2} (white light; Philips TL 65W/25 fluorescent tube). The RH is then decreased to 60% and the seedlings are desiccated further for eight hours. Seedlings are then removed and placed on ½ MS 0.6% agar plates supplemented with 2 μg/ml benomyl and scored after five days.

[0222] The transgenic plants are screened for their improved drought tolerance demonstrating that transgene expression confers drought tolerance.

### Example 19

### Freezing Tolerance Screening

[0223] Seedlings are moved to petri dishes containing ½ MS 0.6% agar supplemented with 2% sucrose and 2 ug/ml benomyl. After four days, the seedlings are incubated at +4° C. for 1 hour and then covered with shaved ice. The seedlings are then placed in an Environmental Specialist ES2000 Environmental Chamber and incubated for 3.5 hours beginning at −1.0° C. decreasing −1° C. hour. The seedlings are then incubated at −5.0° C. for 24 hours and then allowed to thaw at +5° C. for 12 hours. The water is poured off and the seedlings are scored after 5 days.

[0224] The transgenic plants are screened for their improved cold tolerance demonstrating that transgene expression confers cold tolerance.

We claim:

1. A transgenic crop plant transformed with an isolated nucleic acid, wherein the nucleic acid comprises a polynucleotide selected from the group consisting of:
a) a polynucleotide having a sequence as set forth in any of SEQ ID NOS as provided in Column No. 3 of Table 1;
b) a polynucleotide encoding a polypeptide having a sequence as set forth in any of SEQ ID NOS as provided in Column No. 4 of Table 1;
c) a polynucleotide having at least 70% sequence identity to a polynucleotide having a sequence as set forth in any of SEQ ID NOS as provided in Column No. 3 of Table 1;
d) a polynucleotide encoding a polypeptide having at least 70% sequence identity to a polypeptide having a sequence as set forth in any of SEQ ID NOS as provided in Column No. 4 of Table 1; and
e) a polynucleotide that hybridizes under stringent conditions to the complement of any of the polynucleotides of a) through d) above.

2. The transgenic crop plant of claim 1, wherein the expression of the polynucleotide in the plant results in increased yield under normal or stress conditions as compared to a wild type variety of the plant.

3. The transgenic crop plant of claim 1, wherein the expression of the polynucleotide in the plant results in increased stress tolerance to an environmental stress as compared to a wild type variety of the plant.

4. The transgenic crop plant of claim 1, wherein the expression of the polynucleotide in the plant results in increased root growth under normal or stress conditions as compared to a wild type variety of the plant.

5. The transgenic crop plant of claim 1, wherein the plant is a monocot.

6. The transgenic crop plant of claim 1, wherein the plant is a dicot.

7. The transgenic crop plant of claim 1, wherein the plant is selected from the group consisting of maize, wheat, rye, oat, triticale, rice, barley, sorghum, millet, sugarcane, soybean, peanut, cotton, rapeseed, canola, manihot, pepper, sunflower, tagetes, solanaceous plants, potato, tobacco, eggplant, tomato, Vicia species, pea, alfalfa, coffee, cacao, tea, Salix species, oil palm, coconut, perennial grass and a forage crop plant.

8. The transgenic crop plant of claim 1, wherein the plant is a whole plant, a plant cell, a plant part, or a plant seed.

9. A crop plant seed produced by the transgenic crop plant of claim 1, wherein the seed comprises the isolated nucleic acid.

10. The seed of claim 9, wherein the seed is true breeding for increased yield under normal or stress conditions as compared to a wild type variety of the seed.

11. The seed of claim 9, wherein the seed is true breeding for increased stress tolerance to an environmental stress as compared to a wild type variety of the seed.

12. The seed of claim 9, wherein the seed is true breeding for an increased root growth under normal or stress conditions as compared to a wild type variety of the seed.

13. A method of producing a transgenic crop plant containing an isolated nucleic acid encoding a polypeptide, wherein the method comprises the steps of, transforming a plant cell with an expression vector comprising the nucleic acid, and generating from the plant cell the transgenic plant that expresses the polypeptide, wherein the nucleic acid comprises a polynucleotide selected from the group consisting of:
a) a polynucleotide having a sequence as set forth in any of SEQ ID NOS as provided in Column No. 3 of Table 1;
b) a polynucleotide encoding a polypeptide having a sequence as set forth in any of SEQ ID NOS as provided in Column No. 4 of Table 1;
c) a polynucleotide having at least 70% sequence identity to a polynucleotide having a sequence as set forth in any of SEQ ID NOS as provided in Column No. 3 of Table 1;
d) a polynucleotide encoding a polypeptide having at least 70% sequence identity to a polypeptide having a sequence as set forth in any of SEQ ID NOS as provided in Column No. 4 of Table 1; and
e) a polynucleotide that hybridizes under stringent conditions to the complement of any of the polynucleotides of a) through d) above.

14. The method of claim 13, wherein the expression of the polynucleotide in the plant results in increased yield under normal or stress conditions as compared to a wild type variety of the plant.

15. The method of claim 13, wherein the expression of the polynucleotide in the plant results in increased stress tolerance to an environmental stress as compared to a wild type variety of the plant.

16. The method of claim 13, wherein the expression of the polynucleotide in the plant results in increased root growth under normal or stress conditions as compared to a wild type variety of the plant.

17. The method of claim 13, wherein the crop plant is a monocot.

18. The method of claim 13, wherein the crop plant is a dicot.

19. The method of claim 13, wherein the crop plant is selected from the group consisting of maize, wheat, rye, oat, triticale, rice, barley, sorghum, millet, sugarcane, soybean, peanut, cotton, rapeseed, canola, manihot, pepper, sunflower, tagetes, solanaceous plants, potato, tobacco, eggplant, tomato, Vicia species, pea, alfalfa, coffee, cacao, tea, Salix species, oil palm, coconut, perennial grass and a forage crop plant.

20. The method of claim 13, wherein the nucleic acid comprises a polynucleotide having a sequence as set forth in any of SEQ ID NOS as provided in Column No. 3 of Table 1.

21. The method of claim 13, wherein the nucleic acid comprises a polynucleotide having at least 70% sequence identity to a polynucleotide having a sequence as set forth in any of SEQ ID NOS as provided in Column No. 4 of Table 1.

22. The method of claim 13, wherein the nucleic acid comprises a polynucleotide encoding a polypeptide having a sequence as set forth in any of SEQ ID NOS as provided in Column No. 3 of Table 1.

23. The method of claim 13, wherein the nucleic acid comprises a polynucleotide encoding a polypeptide having at least 70% sequence identity to a polypeptide having a sequence as set forth in any of SEQ ID NOS as provided in Column No. 4 of Table 1.

24. The method of claim 13, wherein the nucleic acid is operably linked to one or more regulatory sequences.

25. The method of claim 24, wherein the regulatory sequence is a promoter.

26. The method of claim 25, wherein the promoter is tissue specific.

27. The method of claim 25, wherein the promoter is developmentally regulated.

The application's sequence listing, which the Patent Office published only in electronic form, follows.

SEQUENCE LISTING (129 sequences)

SEQ ID NO: 1 - DNA, 1944 bp, Arabidopsis thaliana
  CDS (1)..(1944)
atgatcaccggcaaagacatgtacgatgttttagcggctatggtgccgctatacgttgctatgatattagcctatggttcggtacggtggtgggggatattcacaccggaccaatgttccggtataaaccggttcgttgcggttttcgcggttcctcttctctctttccatttcatctcctccaatgatccttatgcaatgaattaccacttcctcgctgctgattctcttcagaaagtcgttatcctcgccgcactctttctttggcaggcgtttagccgcagaggaagcctagaatggatgataacgctcttttcactatcaacactgcctaacacgttggtaatgggaatcccattgcttagggcgatgtacggagacttctccggtaacctaatggtgcagatcgtggtgcttcagagcatcatatggtatacattaatgctcttcttgtttgagttccgtggggctaagcttctcatctccgagcagttcccggagacggctggttcaattacttccttcagagttgactctgatgttatctctcttaatggccgtgaacccctccagaccgatgcggagataggagacgacggaaagctacacgtggtggttcgaagatcaagtgccgcctcatcaatgatctcttcattcaacaaatctcacggcggaggacttaactcctccatgataacgccgcgagcttcaaatctcaccggcgtagagatttactccgttcaatcgtcacgagagccgacgccgagagcttctagctttaatcagacagatttctacgcaatgtttaacgcaagcaaagctccaagccctcgtcacggttacactaatagctacggcggcgctggagctggtccaggtggagatgtttactcacttcagtcttctaaaggcgtgacgccgagaacgtcaaattttgatgaggaagttatgaagacggcgaagaaagcaggaagaggaggcagaagtatgagtggggaattatacaacaataatagtgttccgtcgtacccaccgccgaacccaatgttcacggggtcaacgagtggagcaagtggagtcaagaaaaaggaaagtggtggcggaggaagcggtggcggagtaggagtaggaggacaaaacaaggagatgaacatgttcgtgtggagttcgagtgcttctccggtgtcggaagccaacgcgaagaatgctatgaccagaggttcttccaccgatgtatccaccgaccctaaagtttctattcctcctcacgacaacctcgctactaaagcgatgcagaatctgatagagaacatgtcaccgggaagaaaagggcatgtggaaatggaccaagacggtaataacgggggaaagtcaccttacatgggcaaaaaaggtagcgacgtggaagacggcggtcccggtcctaggaaacagcagatgccgccggcgagtgtgatgacgagactaattctgataatggtttggagaaaactcattcgaaaccctaacacttactctagtctctttggccttgcttggtcccttgtctctttcaagtggaatataaagatgccaacgataatgagtggatcgatttcgatattatctgatgctggtcttggaatggctatgtttagtcttggtctatttatggcattgcaaccaaagattattgcgtgcggaaaatcagtagcagggtttgcgatggccgtaaggttcttgactggaccagccgtgatcgcagccacctcaatagcaattggtattcgaggtgatctcctccatatcgccatcgttcaggctgctcttcctcaaggaatcgttccttttgttttcgccaaagaatataacgtccatcctgatattctcagcactgcggttatattcggaatgctggttgctttgcctgtaacagtactctactacgttcttttggggctttaa

SEQ ID NO: 2 - protein, 647 aa, Arabidopsis thaliana
MITGKDMYDVLAAMVPLYVAMILAYGSVRWWGIFTPDQCSGINRFVAVFAVPLLSFHFISSNDPYAMNYHFLAADSLQKVVILAALFLWQAFSRRGSLEWMITLFSLSTLPNTLVMGIPLLRAMYGDFSGNLMVQIVVLQSIIWYTLMLFLFEFRGAKLLISEQFPETAGSITSFRVDSDVISLNGREPLQTDAEIGDDGKLHVVVRRSSAASSMISSFNKSHGGGLNSSMITPRASNLTGVEIYSVQSSREPTPRASSFNQTDFYAMFNASKAPSPRHGYTNSYGGAGAGPGGDVYSLQSSKGVTPRTSNFDEEVMKTAKKAGRGGRSMSGELYNNNSVPSYPPPNPMFTGSTSGASGVKKKESGGGGSGGGVGVGGQNKEMNMFVWSSSASPVSEANAKNAMTRGSSTDVSTDPKVSIPPHDNLATKAMQNLIENMSPGRKGHVEMDQDGNNGGKSPYMGKKGSDVEDGGPGPRKQQMPPASVMTRLILIMVWRKLIRNPNTYSSLFGLAWSLVSFKWNIKMPTIMSGSISILSDAGLGMAMFSLGLFMALQPKIIACGKSVAGFAMAVRFLTGPAVIAATSIAIGIRGDLLHIAIVQAALPQGIVPFVFAKEYNVHPDILSTAVIFGMLVALPVTVLYYVLLGL

SEQ ID NO: 3 - DNA, 1923 bp, Arabidopsis thaliana
  CDS (61)..(1923)
atgatctcatggcacgacctctacacggtcctcaccgccgtgattcctctctacgtggccatgatcctcgcttacggctctgtccggtggtggaaaatcttctcacccgaccaatgctccggaatcaaccgttttgtcgccatcttcgccgtccctctcctctcttttcacttcatctccaccaacaatccttacgcaatgaatctccggttcatcgccgccgacactctccaaaaaatcatcatgttgtcacttttagtcctatgggctaatttcactcgctccggtagcctcgagtggagcatcacaatcttttccctctccacacttcccaacactcttgttatggggattcctctcttgatcgccatgtatggcgaatactctggttccctcatggtccaaatcgtcgtcctccagtgtatcatctggtacacgcttctcctttttctcttcgagtttcgtggcgccaagatgctcatcatggagcagttccctgagacggctgcttccattgtttctttcaaagtcgaatccgacgtcgtttcgctcgacggccatgattttcttgagaccgatgcagagataggtgacgacgggaagcttcacgtcaccgtgagaaaatccaacgcttcacgtcgttcgttctgcggcccgaacatgactccacggccgtcaaatctcaccggagctgagatttatagtctcagcaccactcctagaggctctaatttcaaccactctgatttttacaacatgatgggtttccccggtggtcgtctctccaatttcggtccggcggatatgtactccgttcaatcatctagaggtccaactcctcgaccttcaaacttcgaggagaattgcgccatggcatcctccccgagattcgggtattaccctggaggaggagccgggtcttatccggctccgaatccagagttctcttcaaccaccacatctaccgccaataaaagcgtcaataaaaacccgaaagacgttaatacgaatcagcagacgactcttccaacgggcggcaagtcaaacagccatgacgccaaggagcttcacatgttcgtctggagctcaaacgggtcacccgtttcagaccgggcgggtcttaacgttttcggcggagcacctgacaacgatcaaggcggaagatctgaccaaggtgctaaagagatccgtatgttagtcccagatcaatctcacaacggcgagaccaaagctgtagctcatccagcaagtggagatttcggaggagaacaacaatttagtttcgccggaaaagaagaagaagcagagagaccaaaagacgccgagaatggtctaaacaaacttgctccaaattccacggcggcgctacaatccaagacaggtctaggaggagccgaagcaagtcaacgaaaaaatatgcctccggcgagtgtgatgacaaggctgatactgataatggtttggaggaaactcatcagaaacccaaacacttactctagtctcattggacttatttgggctctcgtcgctttccggtggcacgtggcaatgcccaaaatcattcaacaatctatctccattctatctgatgctggtcttggaatggcaatgtttagtttggggttgttcatggcgttgcaacccaaattaatcgcttgtgggaattcagtggcaacgtttgccatggcggttaggttccttacgggtccggccgtgatggcggttgctgctatagccatcggattacgtggtgatttactgcgtgtcgctatagttcaggccgcattacctcaaggaattgtgccctttgtgtttgcgaaggagtacaatgttcatcctgctattttaagtacaggggtaatatttggaatgcttatagcgcttccgatcacgctggtttactacattctactcgggttataa

SEQ ID NO: 4 - protein, 620 aa, Arabidopsis thaliana
MILAYGSVRWWKIFSPDQCSGINRFVAIFAVPLLSFHFISTNNPYAMNLRFIAADTLQKIIMLSLLVLWANFTRSGSLEWSITIFSLSTLPNTLVMGIPLLIAMYGEYSGSLMVQIVVLQCIIWYTLLLFLFEFRGAKMLIMEQFPETAASIVSFKVESDVVSLDGHDFLETDAEIGDDGKLHVTVRKSNASRRSFCGPNMTPRPSNLTGAEIYSLSTTPRGSNFNHSDFYNMMGFPGGRLSNFGPADMYSVQSSRGPTPRPSNFEENCAMASSPRFGYYPGGGAGSYPAPNPEFSSTTTSTANKSVNKNPKDVNTNQQTTLPTGGKSNSHDAKELHMFVWSSNGSPVSDRAGLNVFGGAPDNDQGGRSDQGAKEIRMLVPDQSHNGETKAVAHPASGDFGGEQQFSFAGKEEEAERPKDAENGLNKLAPNSTAALQSKTGLGGAEASQRKNMPPASVMTRLILIMVWRKLIRNPNTYSSLIGLIWALVAFRWHVAMPKIIQQSISILSDAGLGMAMFSLGLFMALQPKLIACGNSVATFAMAVRFLTGPAVMAVAAIAIGLRGDLLRVAIVQAALPQGIVPFVFAKEYNVHPAILSTGVIFGMLIALPITLVYYILLGL

SEQ ID NO: 5 - DNA, 1923 bp, Arabidopsis thaliana; identical to SEQ ID NO: 3
  CDS (199)..(1923)

SEQ ID NO: 6 - protein, 574 aa, Arabidopsis thaliana
MNLRFIAADTLQKIIMLSLLVLWANFTRSGSLEWSITIFSLSTLPNTLVMGIPLLIAMYGEYSGSLMVQIVVLQCIIWYTLLLFLFEFRGAKMLIMEQFPETAASIVSFKVESDVVSLDGHDFLETDAEIGDDGKLHVTVRKSNASRRSFCGPNMTPRPSNLTGAEIYSLSTTPRGSNFNHSDFYNMMGFPGGRLSNFGPADMYSVQSSRGPTPRPSNFEENCAMASSPRFGYYPGGGAGSYPAPNPEFSSTTTSTANKSVNKNPKDVNTNQQTTLPTGGKSNSHDAKELHMFVWSSNGSPVSDRAGLNVFGGAPDNDQGGRSDQGAKEIRMLVPDQSHNGETKAVAHPASGDFGGEQQFSFAGKEEEAERPKDAENGLNKLAPNSTAALQSKTGLGGAEASQRKNMPPASVMTRLILIMVWRKLIRNPNTYSSLIGLIWALVAFRWHVAMPKIIQQSISILSDAGLGMAMFSLGLFMALQPKLIACGNSVATFAMAVRFLTGPAVMAVAAIAIGLRGDLLRVAIVQAALPQGIVPFVFAKEYNVHPAILSTGVIFGMLIALPITLVYYILLGL

SEQ ID NO: 7 - DNA, 1860 bp, Arabidopsis thaliana
  CDS (61)..(1860)
atgatcacatggcacgacctctacaccgtcctcacggcggtgataccactctacgtagccatgatcctcgcttacggctcagtccggtggtggaaaatcttctcaccagaccaatgttccggcataaaccgcttcgtcgctattttcgccgtccctcttctctctttccacttcatctcctcaaacaatccttacgcaatgaatctccgattcatcgcagccgatacactccaaaaactaatcatgctcactctcctaatcatctgggctaacttcactcgctccggtagtcttgaatggagcatcacaatcttctctctttcaacacttcccaacactctcgttatgggaatacctctcttgatcgccatgtacggagaatattccggctcactcatggttcagatcgttgttcttcagtgtataatctggtacacgcttcttctctttcttttcgaatacagaggagctaagatcttgatcatggaacagtttccagagactggtgcttcgattgtatcgttcaaagttgagtccgatgttgtttctttagatggacatgattttcttgaaactgatgctcaaatcggtgacgatggtaagcttcatgttacggtgagaaaatcaaacgcttctcggagatctttttacggtggtggtggtactaatatgactcctcgtccgtctaatctcaccggagctgagatttatagtcttaacactactccaagaggatctaacttcaatcattctgatttttactctatgatggggtttcccggtggccggctttcgaactttggtccggcggatatgtactctgttcagtcctcgagaggacctactcctagaccttcgaattttgaggagagttgtgctatggcttcttcgccaagattcgggtattacccgggaggagctcccgggtcgtacccagctcctaatccggagttttctaccggtaataaaaccggtagtaaagctccaaaagagaatcatcatcatgtaggaaaatcaaatagtaatgatgctaaggagcttcatatgtttgtttggggatccaacggatcacccgtttcggaccgagctggtcttcaagttgataatggagccaatgaacaagtcggaaaatccgatcaaggcggtgcaaaagagattcgaatgttgatctctgatcatactcaaaatggtgaaaacaaagctggtccgatgaacggggactatggcggggaagaagagtcggagagggtaaaggaagtgcctaacggactacacaagcttcggtgtaactccacagcagagctaaaccctaaagaagctatagaaacgggtgaaactgtaccggtaaaacatatgccaccagcgagtgtgatgactcggctgatattgataatggtgtggaggaaactcataagaaacccaaacacttactctagtctcattggtctcatttgggctcttgttgctttcaggtgggatgtggcaatgcctaaaattattcaacaatcaatctcaattctttctgatgctggtcttggtatggcaatgttcagtttggggttgttcatggcattgcaaccgaaattaattgcttgcggaaattcgacggcgacttttgcgatggcggtgagattctttactggaccagcggtaatggccgtggcagcaatggctattggattacgtggagacctattgcgtgtggccattgttcaagctgcattgcctcaagggatcgtgccgtttgtgtttgcaaaagagtataatgttcatcccgcaatcttgagtacaggggtaatatttggaatgcttatcgcactaccgattacacttgtttactacattttactcgggctataa

SEQ ID NO: 8 - protein, 599 aa, Arabidopsis thaliana
MILAYGSVRWWKIFSPDQCSGINRFVAIFAVPLLSFHFISSNNPYAMNLRFIAADTLQKLIMLTLLIIWANFTRSGSLEWSITIFSLSTLPNTLVMGIPLLIAMYGEYSGSLMVQIVVLQCIIWYTLLLFLFEYRGAKILIMEQFPETGASIVSFKVESDVVSLDGHDFLETDAQIGDDGKLHVTVRKSNASRRSFYGGGGTNMTPRPSNLTGAEIYSLNTTPRGSNFNHSDFYSMMGFPGGRLSNFGPADMYSVQSSRGPTPRPSNFEESCAMASSPRFGYYPGGAPGSYPAPNPEFSTGNKTGSKAPKENHHHVGKSNSNDAKELHMFVWGSNGSPVSDRAGLQVDNGANEQVGKSDQGGAKEIRMLISDHTQNGENKAGPMNGDYGGEEESERVKEVPNGLHKLRCNSTAELNPKEAIETGETVPVKHMPPASVMTRLILIMVWRKLIRNPNTYSSLIGLIWALVAFRWDVAMPKIIQQSISILSDAGLGMAMFSLGLFMALQPKLIACGNSTATFAMAVRFFTGPAVMAVAAMAIGLRGDLLRVAIVQAALPQGIVPFVFAKEYNVHPAILSTGVIFGMLIALPITLVYYILLGL

SEQ ID NO: 9 - DNA, 1860 bp, Arabidopsis thaliana; identical to SEQ ID NO: 7
  CDS (199)..(1860)

SEQ ID NO: 10 - protein, 553 aa, Arabidopsis thaliana
MNLRFIAADTLQKLIMLTLLIIWANFTRSGSLEWSITIFSLSTLPNTLVMGIPLLIAMYGEYSGSLMVQIVVLQCIIWYTLLLFLFEYRGAKILIMEQFPETGASIVSFKVESDVVSLDGHDFLETDAQIGDDGKLHVTVRKSNASRRSFYGGGGTNMTPRPSNLTGAEIYSLNTTPRGSNFNHSDFYSMMGFPGGRLSNFGPADMYSVQSSRGPTPRPSNFEESCAMASSPRFGYYPGGAPGSYPAPNPEFSTGNKTGSKAPKENHHHVGKSNSNDAKELHMFVWGSNGSPVSDRAGLQVDNGANEQVGKSDQGGAKEIRMLISDHTQNGENKAGPMNGDYGGEEESERVKEVPNGLHKLRCNSTAELNPKEAIETGETVPVKHMPPASVMTRLILIMVWRKLIRNPNTYSSLIGLIWALVAFRWDVAMPKIIQQSISILSDAGLGMAMFSLGLFMALQPKLIACGNSTATFAMAVRFFTGPAVMAVAAMAIGLRGDLLRVAIVQAALPQGIVPFVFAKEYNVHPAILSTGVIFGMLIALPITLVYYILLGL

SEQ ID NO: 11 - DNA, 3020 bp, Glycine max
  CDS (755)..(2572)
ccacgcgtccgcgtggatccagagagaaagagtccctttacaaagcttaaagcactcccccaaaacaagtgttcttggagacattcccacctcaacccaaaatacttttcctaagctttttgtgacaaatttaggacccatagaatagaaggtagggagggagagagcctcacacacccacccacccaagtttccaaagccatcaaatcccttcccaaaccccaaatccaaacacacttcaaaaaaagaaaaaaaaaacaaaactaagaaaaaaaaactaaataaaaaggcaacaaaactccccccactctgccttgggggatggtgcgaagcagcggtttccttggccttctgcttcctttcgacaccaccctgcaccacacctcctcatgttcttgccccccacgggggccgcatgtggtacttccccccaagcctgtgccattgccctcaggcttgttttggagactgcaagtgcaaccttgcttgcagctctcaaagctgaaaaaatatttgctgtattctctgctgcacattagcaccatccactcactcacttccccaaaaacacatgctcttccacatccctatataaaatcttttcaatcttcatattcatcatcatcaccaccaactccaactcaaaatatccaaaacttgccacttcaaccttcctatatattccttcctccactctctttctttacttcttctgctatctttctgagagacctgttgacacaaacccacaaatatgatcaccttaacagacttctaccatgtcatgactgcaatggtgccactctatgtggccatgatactagcctatggctcagtgaagtggtggaagattttctcccctgaccaatgctctggcatcaaccgttttgtggcactctttgcagtgcctcttctctccttccacttcatagcctccaacaacccttatgagatgaacctgaggttcctagctgctgacacccttcaaaagatcataatactagtcctccttgcagtttggagcaacatcaccaaaaggggttgtttggaatgggccataaccttgttctctctctccaccctcccaaacactttggttatgggcatccctttgctcaaagggatgtatggtgacttctcagggagcctcatggtgcaaattgtggtcctccagtgcatcatttggtacaccttgatgctcttcttgtttgagtttagaggtgccagaatgctcatctctgagcagttccctgacactgctgcctccattgtctccatccatgtggactctgatgtcatgtcattggatggaagacaaccacttgagactgaagctgagatcaaggaagatggtaaactccatgtcactgtgaggaaatccaatgcttcaagatcagacatcttctctagaaggtctcagggtctctcttccaccactccacgcccttccaaccttaccaatgctgagatatactctttgcaatcctctaggaaccctacgccgagaggctctagtttcaaccacactgatttctactccatgatggctgctggtggcaggaactcaaactttggtgcctctgatgtttatggcctttcagcttcaagagggccaactccaaggccttctaactatgatgaagatggtgggaagccaaagtttcattaccatgctgctggtggaactgggcactaccctgcacctaaccctggcatgttctctccctctaatgggtccaaaagtgttgctgctaatgctaatgccaagaggcctaatgggcaggctcagctgaagcctgaggatgggaatagggaccttcatatgtttgtttggagttcaagtgcttcaccagtctctgacgtgtttggtgcccatgagtatggaggaggtcatgatcagaaagaagtcaaattgaatgtatctccaggaaaagtggagaataatcatagggacactcaagaagactacctagagaaagatgagttcagctttgggaatagagaaatggacagggagatgaatcagcttgaaggtgagaaggttggagatgggaaaccaaaaaccatgcctccagcaagtgtgatgacaaggcttatattgattatggtgtggagaaaactcatcagaaaccccaacacctactctagcctaattggtctcacttggtctcttgtttcattcaagtggaatgttgagatgcctgccataatagcaaagtctatctccatattgtcagacgcagggcttggcatggccatgttcagtcttggtctcttcatggctttgcaaccgagggtcatagcatgtggaaattccacagcagcttttgccatggctgtgagattccttacaggtccagctgtcatggcagctgcttccattgctgttggactcaaaggtgttctcctacacgttgccattgttcaggcagctcttccccaaggaattgtcccatttgtctttgctaaggaatataatgtacatcctgatattctcagcacagctgttatttttgggatgctgattgctttgcccataactctagtgtactacatcttgttggggttgtgaatgaaagaaatgatggatgatacagaagattcacgtgtggcatccatgcaaagcttggttgaggttgttgagaatgagagaaaaaaaaggtcataaagcaacaatagaaaagaagcatcacgagaatttggataggaagaagaaccccaggatcagttttttttatttatttgttttctttttcttttttgaatgaattgccctttcttagtgaaaattaatgtaaaatcatgatgtagctaatttacaaaatgattatctcgttaaaattttatattataatgacctcggattccatgtcactcatcaattgaaggataagaaagcatgggaaactttgttgatgaaaatggtagtgctatgatcattttccccaatataatattaaccttcatattgctttttctttccaaaaaaaaaaaaaaaaaaaaaaaaaaaaaaaaaaaaa

SEQ ID NO: 12 - protein, 605 aa, Glycine max
MITLTDFYHVMTAMVPLYVAMILAYGSVKWWKIFSPDQCSGINRFVALFAVPLLSFHFIASNNPYEMNLRFLAADTLQKIIILVLLAVWSNITKRGCLEWAITLFSLSTLPNTLVMGIPLLKGMYGDFSGSLMVQIVVLQCIIWYTLMLFLFEFRGARMLISEQFPDTAASIVSIHVDSDVMSLDGRQPLETEAEIKEDGKLHVTVRKSNASRSDIFSRRSQGLSSTTPRPSNLTNAEIYSLQSSRNPTPRGSSFNHTDFYSMMAAGGRNSNFGASDVYGLSASRGPTPRPSNYDEDGGKPKFHYHAAGGTGHYPAPNPGMFSPSNGSKSVAANANAKRPNGQAQLKPEDGNRDLHMFVWSSSASPVSDVFGAHEYGGGHDQKEVKLNVSPGKVENNHRDTQEDYLEKDEFSFGNREMDREMNQLEGEKVGDGKPKTMPPASVMTRLILIMVWRKLIRNPNTYSSLIGLTWSLVSFKWNVEMPAIIAKSISILSDAGLGMAMFSLGLFMALQPRVIACGNSTAAFAMAVRFLTGPAVMAAASIAVGLKGVLLHVAIVQAALPQGIVPFVFAKEYNVHPDILSTAVIFGMLIALPITLVYYILLGL

SEQ ID NO: 13 - DNA, 2346 bp, Glycine max
  CDS (148)..(1941)
ttccggtccggaattcccgggtacgacccacgcgtccgcgcccttcataatgccttaaactaaacccttctcttctatctccggccaccgtttatcttttctcaataacctcaaaccttattatattattcggaaagagacacgacaatgataacgttgttggacttgtaccacgttctgacagcggtggtgccgctctacgtggcgatgatcctcgcctacggctccgtgaagtggtggaagatcttcaccccggaccaatgctcgggaataaaccggttcgtggcactcttcgcagtgcccctcctctccttccacttcatctccaccaacaacccctacgccatgaactacaagttcatcgccgcggacacactccaaaaagccatagtcctcgcagtgctcttggtgtggtccagaacaagctcaagaggctcacttgaatggtccataacactcttctctctctcaactctccccaacaccttggtgatgggtatcccgttgctgaagggcatgtacggtgatgactcgggaacactaatggttcagattgtggtgcttcagtgtatcatctggtatacccttatgttgtttcttttcgagtataggggtgcgaggcttttaatagtggagcagtttcctgatacagcgggttcgattatctccttcaaggttgattcggatattatttcgttggatgggaaggagccgcttcagacggaggcggaggttggtgatgacgggaagcttcatgtgacggtgaggaagtcggcgagttcgcggtcggagattttctctaggcgctctcatggccccaactcggtgtcgttgactccgaggccttcgaatttgaccaatgcggagatttactcgctgcagagctcgaggaacccgactccgagaggctcgagttttaaccacacggatttttactccatggtgaatggtaagaacaacaacaacaacaacaacaacgtgagtatgagtccgaggcagagtaattttggaggctttgatgaagaaagtggtgggggtgtgagggtgaatggtggtgctggtgtacgtgggtaccctgggcctgcgaatgcggggattttttctccggtggcggcgaagaagaagggtggtgagagtggtggtggagggaaggatctccacatgtttgtgtggagttcgagtgcttcgccggtgtcggaaggtggaatccatgtcttcagaggtggtggtggggattatgggagtgaccagcttcctgttggtggggtggctcaccagaaagattatgatgagtttggtcacgatgagtttagcttcgggaacagaaccgttgctaatggggttgacaaggaagggccagtgctttcaaagcttggctcgagttccacagctgagcttcgccctaaagctcaaggtgaagccaaacctacttccatgccaccaacaagtgttatgacaaggctcattttgattatggtttggaggaagctgattaggaaccccaacacatattccagcctctttggtctcacttggtctttgatctcattcaaatggaatgttgttatgccagcaattgttgctaaatcgatatcaattttatctgatgctggtcttgggatggcaatgtttagccttgggttattcatggcattgcagccaaagattattgcatgtggaaactcggttgcttcctttgctatggcagttcgttttcttactggtcctgcagtcatggctgttgcttcaatcgttgtagggctcaggggagttctattgcacattgctattgtacaggctgctctgcctcaagggattgtcccttttgtgtttgctaaggaatacaacgttcatcctgacatactaagcaccggggttatatttgggatgctaattgctcttcctattacgctagtttactacattttgcttgggctttgaagcatgttgaggaagcgaaaaaggaatcaagtcatgaagattaaaaaaaaagactaattgcagtgtggatcaaactacccttttgttatatttataggttaatttttttggcatcttctaacaatggtagaatttcgaaatgaagttagtgagagggggggagtgtgaccttgtaattaatctccaaacacaaaaacaatggtgagagttgaaatggaagcaaggagatagtagtatattttagggctatagctagctactaggaaacttttattttggtggttttagcctttttttactgtgaaccccactctcttatattttgcttcgtttaatggaaaaaaagaagagaaagtgaagcttgtttgtagttgtcgaaacacctttctctttcttttcacaagt

SEQ ID NO: 14 - protein, 597 aa, Glycine max
MITLLDLYHVLTAVVPLYVAMILAYGSVKWWKIFTPDQCSGINRFVALFAVPLLSFHFISTNNPYAMNYKFIAADTLQKAIVLAVLLVWSRTSSRGSLEWSITLFSLSTLPNTLVMGIPLLKGMYGDDSGTLMVQIVVLQCIIWYTLMLFLFEYRGARLLIVEQFPDTAGSIISFKVDSDIISLDGKEPLQTEAEVGDDGKLHVTVRKSASSRSEIFSRRSHGPNSVSLTPRPSNLTNAEIYSLQSSRNPTPRGSSFNHTDFYSMVNGKNNNNNNNNVSMSPRQSNFGGFDEESGGGVRVNGGAGVRGYPGPANAGIFSPVAAKKKGGESGGGGKDLHMFVWSSSASPVSEGGIHVFRGGGGDYGSDQLPVGGVAHQKDYDEFGHDEFSFGNRTVANGVDKEGPVLSKLGSSSTAELRPKAQGEAKPTSMPPTSVMTRLILIMVWRKLIRNPNTYSSLFGLTWSLISFKWNVVMPAIVAKSISILSDAGLGMAMFSLGLFMALQPKIIACGNSVASFAMAVRFLTGPAVMAVASIVVGLRGVLLHIAIVQAALPQGIVPFVFAKEYNVHPDILSTGVIFGMLIALPITLVYYILLGL

SEQ ID NO: 15 - DNA, 1827 bp, Oryza sativa
  CDS (1)..(1827)
atggcggcggtggtgccgctgtacgtggcgatgttcctggcgtacgggtcggtgcggtggtggggcatcttcacgccggaccagtgctccggcatcaaccgcttcgtcgccatcttcgccgtgccgctcctgtccttccacttcatctccaccaacgacccgtacgccatgaacctccgcttcctggcggcggacacgctgcagaagctgctcgtcctggcggggctcgccgcgtggtcgcgcctcccctcgcggaccggcgcgccgcggctggactggtccatcacgctcttctccctctccacgctgcccaacacgctcgtcatggggatcccgctgctgatcgccatgtacgggccatactccggctcgctcatggtccagatcgtcgtgctccagtgcatcatctggtacacgctgatgctcttcctcttcgagttccgcgccgcgcggatgctgatcgccgaccagttcccggacacggcggcgtccatcgtgtccctgcacgtcgacccggacgtggtgtcgctggagggcggccacgcggagacggaggccgaggtggcggcggacgggcggctgcacgtcaccgtgcgccggtcctcggtgtcgcggcggtcgctgctggtcacgccgcggccgtcgaacctgacgggagcggagatctactcgcttagctcgtcgcggaacccaaccccgcggggctccaacttcaaccacgccgacttcttcgccatggtcggcggcgggccaccgcccccgacgcccgctgcggtgcgcggctcgagcttcggcgcctccgagctctactcgctgcaatcgtcgcggggcccaaccccgaggcagtccaacttcgacgagcactcggcacggccgccgaaaccaccggcaacgaccacgggggcactcaaccacgatgccaaggagctccacatgttcgtgtggagctcgagcgcgtctcccgtctcagaagtcagcggcctgcctgtgttcagtggcggcggcggcggcggcgctctcgacgtcggcgccaaggaaatccacatggtcatccccgccgacctgccgcagaacaacggctcaggcaaagagcacgaggagtacggcgcagtggcattgggtggcggcggcggcggagagaacttcagcttcggaggcggcaagacggtggacggcgccgaggcagtagacgaggaggcggccttgcctgacgggctgacgaagatggggtcgagctcgacggcggagctgcacccgaaggtcgtcgacgtcgacggaccgaacgccggcggcggcgccgcgggcgcggggcagtaccaaatgccgccggcgagcgtgatgacacgcctcatcctcataatggtgtggcgcaagctcatccgcaaccccaacacttactccagcctcctcggcctcgcctggtccctcgtcgccttccggtggcacgtctccatgccagcaatcgtcgagaagtccatctccattctctcggacgcaggcctggggatggccatgtttagcctgggattgttcatggcgctgcagcccagcatcatcgcgtgtggcaaatcagccgccgtcgtctccatggccgtccgcttcctcgcgggccctgccgtcatggccgccgcgtcaatcgccatcggactccgcgggacgctcctgcacgtcgccattgttcaggcggctctaccacaagggattgtgccttttgtttttgcaaaagaatacaatgtccacccggccatcctgagcacagcggtaatttttggcatgctaatagctcttccaatcacattgctgtactacatccttcttggactatga

SEQ ID NO: 16 - protein, 608 aa, Oryza sativa
MAAVVPLYVAMFLAYGSVRWWGIFTPDQCSGINRFVAIFAVPLLSFHFISTNDPYAMNLRFLAADTLQKLLVLAGLAAWSRLPSRTGAPRLDWSITLFSLSTLPNTLVMGIPLLIAMYGPYSGSLMVQIVVLQCIIWYTLMLFLFEFRAARMLIADQFPDTAASIVSLHVDPDVVSLEGGHAETEAEVAADGRLHVTVRRSSVSRRSLLVTPRPSNLTGAEIYSLSSSRNPTPRGSNFNHADFFAMVGGGPPPPTPAAVRGSSFGASELYSLQSSRGPTPRQSNFDEHSARPPKPPATTTGALNHDAKELHMFVWSSSASPVSEVSGLPVFSGGGGGGALDVGAKEIHMVIPADLPQNNGSGKEHEEYGAVALGGGGGGENFSFGGGKTVDGAEAVDEEAALPDGLTKMGSSSTAELHPKVVDVDGPNAGGGAAGAGQYQMPPASVMTRLILIMVWRKLIRNPNTYSSLLGLAWSLVAFRWHVSMPAIVEKSISILSDAGLGMAMFSLGLFMALQPSIIACGKSAAVVSMAVRFLAGPAVMAAASIAIGLRGTLLHVAIVQAALPQGIVPFVFAKEYNVHPAILSTAVIFGMLIALPITLLYYILLGL

SEQ ID NO: 17 - DNA, 2135 bp, Oryza sativa
  CDS (1)..(1884)
atggtgccgctgtacgtggcgatgatcctggcgtacgggtcggtgaagtggtggcgcatcttcacgcccgaccagtgctccgggatcaaccgcttcgtggcgctcttcgccgtcccgctcctctccttccacttcatctccaccaacaacccctacaccatgaacctccgcttcatcgccgccgacaccctgcagaagctcatcgtcctcgcgctcctcaccctgtggagccacctctcccgccgcggctccctcgagtggaccatcaccctcttctccctctccacgctgcccaacacgctcgtcatggggatcccgctgctgaaggggatgtacggggagttctccggtagcctcatggtgcagatcgtggtgctccagtgcatcatctggtacacgctgatgctcttcatgttcgagtaccgcggcgccaggatcctcatcaccgagcagttcccggacaccgcgggcgccatcgcgtccatcgtcgtggacgccgacgtcgtgtcgctcgacgggcggagggacatgatcgagacggaggccgaggtgaaggaggacggcaagatacacgtcaccgtgcgccgctccaacgcgtcgcgctccgacgtctactcgcggcgctccatggggttctccagcaccacgccgcggccgagcaacctcaccaacgccgagatctactcgctgcagtcgtcgcgcaacccgacgccgcggggctccagcttcaaccacactgacttctactccatggtcgggcgcagctccaacttcgccgccggggacgcgttcggggtgcgcaccggcgccacgccgcggccgtccaactacgaggaggacgcggcggcgcccaacaaggccggcagcaagtacgggcagtacccggcgcccaacccggccatggcggcgccgcccaagcccaagaaggcggccaacggccaggccaagggcgaggacggcaaagacctccacatgttcgtctggagctccagcgcgtcgcccgtgtccgacgtcttcggcaacggcgccgagtacaacgacgccgccgccgtcaaggaggtccgcatggccgtcgcctcgccgcgcaaagcggacggcgtggagagggacgacttcagcttcgggaacagaggcgtcgccgagagggacgcggaggccggcgacgagaagagcgtggcggcggcggtgtcgggtgagcatggcaagcctggcttgacgccggcgccgacggcgatgccgccgacgagcgtgatgacgcggctcatcctgatcatggtgtggcgcaagctcatccgcaaccccaacacctactccagcctcatcggcctcatctggtcgctcgtctgcttccggtggaacttcgagatgccggcgatcatcctgaaatccatctccatcctctccgacgccggcctcggcatggccatgttcagcctcgggctgttcatggcgctgcagccgcggatcatcgcgtgcgggaacaaggtggcgacgttcgccatggcggtgcggttcctgaccggcccggccgtcatggccgccgcctccatcgccgtcggcctccgcggcacgctcctccacgtcgccatcgtgcaggcagcgttgccacagggcattgtccccttcgtcttcgccaaggagtacagcgtgcaccccgacattctcagcacggcggtcatctttggcatgctcatcgcgctgcccatcacgctggtgtactacatcctgctggggctgtggaagaagacagagctggtacactgtttgcaaagtcaggactctttgatttttcttttcttttctgtatttcttgaagtagaatttgggaggagggggattggaagggagtcaaacgagtcaaggggaggacaggatggtagctagcttagctaggacaatggtgagtcacaaaagagcaccaaaagcaagtacaagtacaaagcttggggggacacaggatccagttcaggtcacagaaacggttcggttttgggaggggattgtgggagttttggttggctgcgctgcgctgacccttgtaaaacggacgccgattctgacaagagatcgaccttgttttgttcgtgtcgtggtattgctgactactactttggaatgattaatctcctactact

SEQ ID NO: 18 - protein, 627 aa, Oryza sativa
MVPLYVAMILAYGSVKWWRIFTPDQCSGINRFVALFAVPLLSFHFISTNNPYTMNLRFIAADTLQKLIVLALLTLWSHLSRRGSLEWTITLFSLSTLPNTLVMGIPLLKGMYGEFSGSLMVQIVVLQCIIWYTLMLFMFEYRGARILITEQFPDTAGAIASIVVDADVVSLDGRRDMIETEAEVKEDGKIHVTVRRSNASRSDVYSRRSMGFSSTTPRPSNLTNAEIYSLQSSRNPTPRGSSFNHTDFYSMVGRSSNFAAGDAFGVRTGATPRPSNYEEDAAAPNKAGSKYGQYPAPNPAMAAPPKPKKAANGQAKGEDGKDLHMFVWSSSASPVSDVFGNGAEYNDAAAVKEVRMAVASPRKADGVERDDFSFGNRGVAERDAEAGDEKSVAAAVSGEHGKPGLTPAPTAMPPTSVMTRLILIMVWRKLIRNPNTYSSLIGLIWSLVCFRWNFEMPAIILKSISILSDAGLGMAMFSLGLFMALQPRIIACGNKVATFAMAVRFLTGPAVMAAASIAVGLRGTLLHVAIVQAALPQGIVPFVFAKEYSVHPDILSTAVIFGMLIALPITLVYYILLGLWKKTELVHCLQSQDSLIFLFFSVFLEVEFGRRGIGRESNESRGGQDGS

SEQ ID NO: 19 - DNA, 4202 bp, Oryza sativa
  CDS (1)..(3045)
atggcgatggatttggacgagccgctcgacgcggagaagggcgaggcggcgctgcggcggctgcgcgacgccgacccggccctctacctctccccctccgccgacctcgccgccgccgcccgtgaggcctccaagcacctctacgcctcgctcgtccccttctcccccgcgcagccgcccccgctctccaacctcctcgcaggccccgccttcgacgccgagcagatttggtcccagattgagctgctctcccgccctctcatcccccacctgcgccgccagctccgccgcctcgagcagcaacccccgtctcagccgccgcctcgtacggaatcgaagtccgctgatgccgaagagaagtcagaggaggaggaggatggtgaaggtgacgaagaattggaggagttggacgatgtagatgatgaagaggaatcagaggaggaggaaaaggaagaattaggattggagggtgaagcagggaatgaagtggaggacgagttcttcaagataaaggatctcgataagttcatggtaaagggggaggaggcggaatatggtgggggtgccaagcaagggaagaagaagaagaaaacagagaactggatggaagaagatagtgattcggaggacgaggagtatcttgatgaggatgaagaagatgacgatgagcacttggatgaagcggatgaccaaaaagtaaggaagaaaggtggctccaagaaagttcaattcaaggatgaaccagataaaccagaagttgatgacaaaaatgatgatggaaatgatgaacagggtttgtcaactcacgagaaggcgcgcctgaagatgcatgctaaaatagaggaaatggagaaagctaatcttgaacctataatcactgaggaagtcactgcttctcttgaagagatgataaagaaaagaataatagagggtcattttgacgatgttgaaaagccttctcccttgcaatttaaatccccaaaggaacaaaaggatctggatgaaagtaagagcaagaagggtcttgctgaactatatgaggatgattatgcgcaaaaagctggccttgcacctgcaccactttctatttcagatgaacttaagaacgaggcaaagaccttatttaagagaatatgcttgaagttggatgcactatctcatttccactttgctccaaagccggtcattgaagatatgtctatacaagcaaatgtaccagctctagcaatggaggagattgcacctgtagctgtttcagatgctgcaatgcttgctcctgaagaaatttttgaaggaaaaggtgatgttaaagaagaagcagaacttacacaagctgagcgcaaaagaagaagagctaacaagaaaaggagatatgcagccatgatcacggtggtggacctgtaccacgtcctgacggcggtggtgccgctgtacgtggcgatgacgctggcgtacgcctccgtccggtggtggcgcatcttctccccggaccagtgctccggcatcaaccgcttcgtcgcgctcttcgccgtcccgctcctctccttccacttcatctccaccaacaaccccttcgccatgaacctccgcttcctcgccgccgacacgctccagaagctcatcgtcctcgccctcctcgccctctggtgccgcctctccgcgcgcgggtcactcgactggctcatcaccctcttctccctctccaccctccccaacaccctcgtcatgggcatcccgctgctcaaggggatgtacgccgccgccgccgacgtcgactccggcagcctcatggtgcagatcgtcgtgctccagtgcatcatctggtacacgctcatgctgttcctcttcgagtaccgcggcgcgcggcttcttgtcatggagcagttcccggacaccgccgcctccatcgtctccttccgggtggattccgacgtcgtctcgctcgccggcggcggtggtggagccgcggagctgcaggcggaggcggaggtcggggacgatggcaggatgcgggtcaccgtgcgcaagtcgacgagctcgcgctccgaggcggcgtgctcgcacgggacgcagtcacactcgcagtccatgcaggcgcgcgtctccaacctctccggcgtcgagatttactcgctgcagtcgtcgcggaacccgacgccgcgtggctccagcttcaaccacgccgagttcttcaacatcgtcggcaacggcaagcagggcgacgaggagaagggcgccgccggtggcgggggccactcgccgcagccggtggtggggaagaggaaggacctgcacatgttcgtgtggagctcaagcgcctcgccggtgtcggagcgcgccgccgcagcagcagctggcgcggtgcacgtcttcggcggtggtggcgccgaccacggcgacgccaaaggagctcaggcctatgatgagtacagtttcgggaacaagaacgagaaggacgggccgacgctgtccaagctggggtccaactcgacggcgcagctccggccaaaggacgacggcgaggggatggcggcggcgatgccgccggcgagcgtgatgacgaggctcatcctgatcatggtttggaggaagctgatcaggaaccccaacacttactccagcctccttggtgtcatctggtccctcgtctcctacaggtgggggattgagatgccagccatcatcgcccggtcgatttcgatcctgtcagatgcagggcttggaatggccatgttcagcctaggattgttcatggcattgcagccacggatcattgcctgtgggaactcccttgcttcgtatgccatggccgtcaggttcctcgtgggtccggccgtcatggctgccgcctccatcgccgtcggacttcgcggggtgcttctgcacattgccattgttcaggccgctcttcctcaaggaatcgtgccctttgtgtttgccaaggagtacaatgttcatcctaacattctgagcacagccgtgatattcgggatgctgattgctctccccatcacattggtctactacatactgctggggctctgaagagctctccaagtctcaactcaactgtgcaagaacttgatgttactgacagtttgattaggatttatggtctgttttagttgctcagattttgtttggatgataggtcagcttagtgatgctaggtggacaattatccgagaacttttgggttcaagtgacggccagccacggtttctgattgaagattaggaacatagacatcacattagtgatcccccccatccaatttgtaagacattgagaaggtctgtttcaaattactgacaatgtagtaagacattgaacagtgcttatttagcattccaataactgatggtaatgcgcttacttaaggagctaaaagacaaacttggtacactgtttcaaagtcaggactctttattttttcttttcttttctgtatttcttaaagtagaatttggaagaaggggaattggaagggagtcaaacgagtcaagggaaggacagaatggtagctagcttagctaggacaatggtgagtcacaaaagagcaccaaaagcaagtacaagtacaaagcttggggggacacaggatccagttcaggtcacagaaacggttcggttttgggaggggattgtgggagttttggttggctgcgctgcgctgacccttgtaaaacggacgccgattctgacaagagatcgaccttgttttgttcgtgtcgtggtattgctgactactactttggaatgattaatctcctactactaattactccggaaacgcttacattatgaacaagtagtcagccatttttactgttcagcattacctcctgacccaaggatccattcatgatgagtattgtgcaaatggcaacgcagcattgacagacatggaggcagagagcaggctaggaaaggtagggtgaagggttgggctccaatgcttttgatcacaggatctgtactctggtggcacaacagacagacagctgttccaggtcaaagaccctgacgtaacccatctcccgtcccacaagaaaaggcgagcgaacgtattggaatgtgggatgggtaaaagaaatcttttgtttcttgttacactagtcgtagtagtagtgtagtaatgcaattttacaatatcattttttacactatagagtatcaatggagtgcatgtattcagaggc

SEQ ID NO: 20 - protein, 1014 aa, Oryza sativa
MAMDLDEPLDAEKGEAALRRLRDADPALYLSPSADLAAAAREASKHLYASLVPFSPAQPPPLSNLLAGPAFDAEQIWSQIELLSRPLIPHLRRQLRRLEQQPPSQPPPRTESKSADAEEKSEEEEDGEGDEELEELDDVDDEEESEEEEKEELGLEGEAGNEVEDEFFKIKDLDKFMVKGEEAEYGGGAKQGKKKKKTENWMEEDSDSEDEEYLDEDEEDDDEHLDEADDQKVRKKGGSKKVQFKDEPDKPEVDDKNDDGNDEQGLSTHEKARLKMHAKIEEMEKANLEPIITEEVTASLEEMIKKRIIEGHFDDVEKPSPLQFKSPKEQKDLDESKSKKGLAELYEDDYAQKAGLAPAPLSISDELKNEAKTLFKRICLKLDALSHFHFAPKPVIEDMSIQANVPALAMEEIAPVAVSDAAMLAPEEIFEGKGDVKEEAELTQAERKRRRANKKRRYAAMITVVDLYHVLTAVVPLYVAMTLAYASVRWWRIFSPDQCSGINRFVALFAVPLLSFHFISTNNPFAMNLRFLAADTLQKLIVLALLALWCRLSARGSLDWLITLFSLSTLPNTLVMGIPLLKGMYAAAADVDSGSLMVQIVVLQCIIWYTLMLFLFEYRGARLLVMEQFPDTAASIVSFRVDSDVVSLAGGGGGAAELQAEAEVGDDGRMRVTVRKSTSSRSEAACSHGTQSHSQSMQARVSNLSGVEIYSLQSSRNPTPRGSSFNHAEFFNIVGNGKQGDEEKGAAGGGGHSPQPVVGKRKDLHMFVWSSSASPVSERAAAAAAGAVHVFGGGGADHGDAKGAQAYDEYSFGNKNEKDGPTLSKLGSNSTAQLRPKDDGEGMAAAMPPASVMTRLILIMVWRKLIRNPNTYSSLLGVIWSLVSYRWGIEMPAIIARSISILSDAGLGMAMFSLGLFMALQPRIIACGNSLASYAMAVRFLVGPAVMAAASIAVGLRGVLLHIAIVQAALPQGIVPFVFAKEYNVHPNILSTAVIFGMLIALPITLVYYILLGL

SEQ ID NO: 21 - DNA, 1533 bp, Oryza sativa
  CDS (1)..(1533)
atgatatcgtggcacgagctgtacatggtgctgtcggcggtggtgccgctgtacgtggcgatgatggtggcgtacggctccgtgcggtggtggggcgtcctcacgccggagcagtgctccggcatcaaccgcttcgtcgccgtcatcgccgtcccgctcctctccttccacttcatctcctccagcgacccctacgccatgaacctccgcttcgtcgccgccgacaccctgcagaagatcgtcgtgctccagtccatcgtctggtacacgctcctgctcttcctcttcgagttccgcgccgcgcgggtgctcatcgcggcgcagttcccggacaccgcggcgtccatcgccgccgtgcacgtcgacccggacgtggtgtcgctcgagggcagccaggcggaggcgcacgccgaggtggcgcccgacgggaggctgcgcatggtcgtgtgccgctcgtcggtgtcgaggcggtccgccgccgccgccgccacgccgcgcgcgtcgaacctgaccggcgtggagatctactcgatcagctcgtcgcggaacgccaccccgaggggctccaccttcaccctcgccgacatccctggtcaccagccgcccaacagcgcgctgcgcgcgtccagcttcggcgccgcggacctcttctcgctgcactcttcgtcgaggcagcacaccccgaggccgtccagcttcgacgagcacgcggcggcgcgggccagagcatccgcgaccgtggctcccaccaatgacctcaaggacacgcacatgatcgagtggagctccggcgcttccgccgcgtcggaggtcaccggcctgccggtgttccgcagcggccgggagacgcgccggcttgtcccctccgacgcgccatccattgcctcgtcgagagttatccgaccgccgccgggagcgacgggcggggagcgcgcggcgagcttcaacaaggccgtgggcgggcaggacgagctagcgaagctggaggccggcgccaagacggagcagcagacgacggcggtgactacgacgacgaagggcggcggcgcagcgggcgcggagcgggcgagagggcagcagaacgcgccggccggcgtgatgctgcggctcatcctcactacggtttggcgccggctgatccggaaccccaacacgtacgccagcctcatcggcctcacctggtcgctcatcgcgttccggttccacatcacgatgccaatcatagtagccaaatcaatctccattctctccgatgcagggttaggcatggccatgtttagcttaggattgttcatggccacgcagccgaagatcatcgcctgcggctactccgtcgcggcggccagcatgggcgtccgcttcttcttcggccccgccatcatggccgccgcgtccgccgccgtcggcatccgaggcacgctcttgcgtatcgccattgttcaggccgccctgccacaaggaattgtgccatttgtgttcgctaaggaatacaacctccacgctaccatcctttgcactttttgcagctgctaa

SEQ ID NO: 22 - protein, 510 aa, Oryza sativa
MISWHELYMVLSAVVPLYVAMMVAYGSVRWWGVLTPEQCSGINRFVAVIAVPLLSFHFISSSDPYAMNLRFVAADTLQKIVVLQSIVWYTLLLFLFEFRAARVLIAAQFPDTAASIAAVHVDPDVVSLEGSQAEAHAEVAPDGRLRMVVCRSSVSRRSAAAAATPRASNLTGVEIYSISSSRNATPRGSTFTLADIPGHQPPNSALRASSFGAADLFSLHSSSRQHTPRPSSFDEHAAARARASATVAPTNDLKDTHMIEWSSGASAASEVTGLPVFRSGRETRRLVPSDAPSIASSRVIRPPPGATGGERAASFNKAVGGQDELAKLEAGAKTEQQTTAVTTTTKGGGAAGAERARGQQNAPAGVMLRLILTTVWRRLIRNPNTYASLIGLTWSLIAFRFHITMPIIVAKSISILSDAGLGMAMFSLGLFMATQPKIIACGYSVAAASMGVRFFFGPAIMAAASAAVGIRGTLLRIAIVQAALPQGIVPFVFAKEYNLHATILCTFCSC

SEQ ID NO: 23 - DNA, 1719 bp, Oryza sativa
  CDS (1)..(1719)
atgatatcgtggcacgagctgtacatggtgctgtcggcggtggtgccgctgtacgtggcgatgatggtggcgtacggctccgtgcggtggtggggcgtcctcacgccggagcagtgctccggcatcaaccgcttcgtcgccgtcatcgccgtcccgctcctctccttccacttcatctcctccagcgacccctacgccatgaacctccgcttcgtcgccgccgacaccctgcagaaggtgctcgtcctcgccgcgctcgccgcgtggtcgcgcttccccgcgcgcttcgtccccccggcgtggccgccgctcgactgctccatcacgctcttctccgtctccaccctccccaacacgctcgtcatggggatcccgctcctcgtctccatgtacggcccttactccggcgacctcatggtccagatcgtcgtgctccagtccatcgtctggtacacgctcctgctcttcctcttcgagttccgcgccgcgcgggtgctcatcgcggcgcagttcccggacaccgcggcgtccatcgccgccgtgcacgtcgacccggacgtggtgtcgctcgagggcagccaggcggaggcgcacgccgaggtggcgcccgacgggaggctgcgcatggtcgtgtgccgctcgtcggtgtcgaggcggtccgccgccgccgccgccacgccgcgcgcgtcgaacctgaccggcgtggagatctactcgatcagctcgtcgcggaacgccaccccgaggggctccaccttcaccctcgccgacatccctggtcaccagccgcccaacagcgcgctgcgcgcgttcagcttcggcgccgcggacctcttctcgctgcactcttcgtcgaggcagcacaccccgaggccgtccagcttcgacgagcacgcggcggcgcgggccagagcatccgcgaccgtggctcccaccaatgacctcaaggacacgcacatgatcgagtggagctccggcgcttccgccgcgtcggaggtcaccggcctgccggtgttccgcagcggccgggagacgcgccggcttgtcccctccgacgcgccatccattgcctcgtcgagagttatccgaccgccgccgggagcgacgggcggggagcgcgcggcgagcttcaacaaggccgtgggcgggcaggacgagctagcgaagctggaggccggcgccaagacggagcagcagacgacggcggtgactacgacgacgaagggcggcggcgcagcgggcgcggagcgggcgagagggcagcagaacgcgccggccggcgtgatgctgcggctcatcctcactacggtttggcgccggctgatccggaaccccaacacgtacgccagcctcatcggcctcacctggtcgctcatcgcgttccggttccacatcacgatgccaatcatagtagccaaatcaatctccattctctccgatgcagggttaggcatggccatgtttagcttaggattgttcatggccacgcagccgaagatcatcgcctgcggctactccgtcgcggcggccagcatgggcgtccgcttcttcttcggccccgccatcatggccgccgcgtccgccgccgtcggcatccgaggcacgctcttgcgtatcgccattgttcaggccgccctgccacaaggaattgtgccatttgtgttcgctaaggaatacaacctccacgctaccatcctttgcactttttgcagctgctaa

SEQ ID NO: 24 - protein, 572 aa, Oryza sativa
MISWHELYMVLSAVVPLYVAMMVAYGSVRWWGVLTPEQCSGINRFVAVIAVPLLSFHFISSSDPYAMNLRFVAADTLQKVLVLAALAAWSRFPARFVPPAWPPLDCSITLFSVSTLPNTLVMGIPLLVSMYGPYSGDLMVQIVVLQSIVWYTLLLFLFEFRAARVLIAAQFPDTAASIAAVHVDPDVVSLEGSQAEAHAEVAPDGRLRMVVCRSSVSRRSAAAAATPRASNLTGVEIYSISSSRNATPRGSTFTLADIPGHQPPNSALRAFSFGAADLFSLHSSSRQHTPRPSSFDEHAAARARASATVAPTNDLKDTHMIEWSSGASAASEVTGLPVFRSGRETRRLVPSDAPSIASSRVIRPPPGATGGERAASFNKAVGGQDELAKLEAGAKTEQQTTAVTTTTKGGGAAGAERARGQQNAPAGVMLRLILTTVWRRLIRNPNTYASLIGLTWSLIAFRFHITMPIIVAKSISILSDAGLGMAMFSLGLFMATQPKIIACGYSVAAASMGVRFFFGPAIMAAASAAVGIRGTLLRIAIVQAALPQGIVPFVFAKEYNLHATILCTFCSC

SEQ ID NO: 25 - DNA, 3291 bp, Zea mays
  CDS (391)..(2481)
ccgtcgtgtccctggccatcggcctccgagggacccttttgcggatcgccattgtgcaggcggctctaccgcaagggatcgtgcccttcgtgttcgcgaaagaatacaacgtccacccggccatcctgagcactatggtaatttttggcatgctgatagcgctgccgatcaccttgatctactacatccttcttggactgaagccagtgtagtgtagctgcttcgttcgtcctgctccacacatgatgaggcatgagcgaggtagtagaccaccatggacgacgctgagctggttgcactcgagcgtggcccacatgcatggctggagccttgtaattttgagtcagctccagtgttccctttgtggggtgaggtgattagtagacatgcatgcggtttttgttgcttattactaatccattcttgggacctcgagccggcgggacttccttcacaagaccggaggagcccactcctgcatgtaactcagatactccacccgagagtccgcaccaactcacatcacacctcaccttccactccagaagaagaagccagaccggaatcccgagagccctgcccctgctccctcggttcctcctccgttgggcgtttggccgccgggggtggtgggccgagaccgagatgatatcgtggaacgatgtatacacggtgctgaccgcgatggtgcccctgtacgtggccatgttcctggcgtacgggtcggtgcggtggtggcgcatcttcacggcggaccagtgctccggcatcaaccgcttcgtggccatcttcgccgtgccgctgctgtccttccacttcatctccaccaacgacccgtacgccatgaacctccggttcctggccgcggacacgctgcagaagctggtcgtcctcgcggggctggccgcgtgctcgcgcctgccctccaggctggcggcgccgcggctggactggtccatcacgctcttctccgtgtcgacgctgcccaacacgctggtgatgggcatcccgctgctgatcgccatgtacggtccctacgccgggtccctgatggtgcaggtggtggtgctccagtgcatcatctggtacacgctgctgctgttcctcttcgagttccgcgccgcgcggacgctcatcgcggaccagttcccggacaccgcggcggccatcgcgtcgctgcacgtggacccggacgtggtgtcgctggagggcgggcgcgccgagacggaggccgaggtggcggaggacggccggctccacgtgacggtgcgccggtcgtcggcgtcgcggcggtcgctgctgatggcgacgccgcggccgtccaacctgacgggcgcggagatatactcgatgagctcgtcgcggcagcacagcccgcggggctccaacttcaaccacgccgacttcttcgccatggtcgacggcgcgccgcccccgccggcgcccggcgcgcgcgcctcgagcttcggcgccgccgagctgtactcgatgcactcgtcgcgggggccgacgccgcggcagtccaacttcgacgagcgctcggcctcggcccggtcgtcgaggcccgcggccgtgcccagccacgacgccaaggagctccacatgttcgtgtggagctcgggcgcctcccccgtctcggacgtcagcggcctgccggccttcaacggtggtggcgcgggtggcgtcaacgtcggcgccaaggaaattcgcatggttgtccccgccgagatgccgcagaacggctcggccggctcagagaacgagaacaacggtgcagcagcagcagcgacgggggaagccgagggtttcggcttcagatcaggcggcaagacgacggcggaggacgccgaggcgggagaagcagcagggcccgagcagctaacgaagctggggtccaggtgctcgacggccgagctgcgcgcgaaggacgacggcggtggtggcgcgggctcggcggcgcagcagatgccgccggcgagcgtgatgacccgcctgatactaatcatggtgtggcgcaagctgatccgcaacccgaacacgtactccagcctcatcggcctcgcctggtccctcgtcgcgttccggtggcacatctccatgccggcggtcgtggccaagtccatcgccatcctctcggacgccgggctggggatggccatgtttagcctgggattgtttatggcgctgcagccgaagctcatcgcgtgcggatggcgcgccacaggcgtctccatggccgtccgcttcctcgccggccctgccgtcatggccgccgcgtccctggccatcggcctccgagggacccttttgcggatcgccattgtgcaggcggctctaccgcaagggatcgtgcccttcgtgttcgcgaaagaatacaacgtccaccctgccatcctgagcactatggtaatttttggcatgctgatagcgctgccgatcaccttgatctactacatccttcttggactgaagccagtgtagtgtagctgcttcgttcgtcctgctgcacacacatgatgaggcatgcatgagcgaggtcctagtagaccaccatggacgacgctgagctggttgcactcgagcgtggcccacatgcatggctggagccttgtaattttgagtcagctccagtgttccctttgtgggggtgattagacatgcatgcggtttttgttgcttattactaatccatcttgtcgtttgaggattgcatgtagtgtcgtccatgcccatataaaccctagtttaagctttgagggccctctatcctagagatctcgatttgcccgtagcgagaaatgaaccatacatgcgtgacgatatttgctcgctgcattgggatttgggaaacggatatactgcgaagacgagaagtttactgtgcgcatcatcggtttgtgcgaagctgagttcaaaggaaaatacagtcaatatatactccctcctatttgcattcacaattgatctcgtcttgtattcttgaagccagtgtagggtagctgcttcgtcctgctccccccataattaggcatgagcgaggtagtagacccccatggacgacctttagctggttgaactcgagggtggcccccatgcatggctggagccttgtaattttgagtcagctccagtgttccctttgtggggtgattaaacatgcatgcggtttttgttgcttattactaatccatcctgtcgtttgaggattgcaaaaaaaaaaaaaaaaaaaaaaaaaaaaaaaaaaaaaaaaaaaaaaaaaaaaaaaacaaaaaaaaaaaaaaaaaagcggcc

SEQ ID NO: 26 - protein, 696 aa, Zea mays
MRFLLLITNPFLGPRAGGTSFTRPEEPTPACNSDTPPESPHQLTSHLTFHSRRRSQTGIPRALPLLPRFLLRWAFGRRGWWAETEMISWNDVYTVLTAMVPLYVAMFLAYGSVRWWRIFTADQCSGINRFVAIFAVPLLSFHFISTNDPYAMNLRFLAADTLQKLVVLAGLAACSRLPSRLAAPRLDWSITLFSVSTLPNTLVMGIPLLIAMYGPYAGSLMVQVVVLQCIIWYTLLLFLFEFRAARTLIADQFPDTAAAIASLHVDPDVVSLEGGRAETEAEVAEDGRLHVTVRRSSASRRSLLMATPRPSNLTGAEIYSMSSSRQHSPRGSNFNHADFFAMVDGAPPPPAPGARASSFGAAELYSMHSSRGPTPRQSNFDERSASARSSRPAAVPSHDAKELHMFVWSSGASPVSDVSGLPAFNGGGAGGVNVGAKEIRMVVPAEMPQNGSAGSENENNGAAAAATGEAEGFGFRSGGKTTAEDAEAGEAAGPEQLTKLGSRCSTAELRAKDDGGGGAGSAAQQMPPASVMTRLILIMVWRKLIRNPNTYSSLIGLAWSLVAFRWHISMPAVVAKSIAILSDAGLGMAMFSLGLFMALQPKLIACGWRATGVSMAVRFLAGPAVMAAASLAIGLRGTLLRIAIVQAALPQGIVPFVFAKEYNVHPAILSTMVIFGMLIALPITLIYYILLGLKPV

SEQ ID NO: 27 - DNA, 2769 bp, Zea mays
  CDS (171)..(1892)
ccacgcgtccgctgagccctacaaccactctcttcttcattgctccacactaccatctcatctctccgccattttacaccactcccttctcgttgcaacccaacaaattggcactgctcgtcgccgacccctcctccctccccgcgtcccccgacaagccatccgcggccatgatcaccgcgctggacctctaccacgtgctgacggcggtggtgccgctgtacgtggccatgacgctggcgtacggctccgtccgctggtggcgcatcttcacgccggaccagtgctccgggatcaaccgcttcgtggcgctcttcgccgtgccgctcctctccttccacttcatctccaccaacgaccccttcgccatgaacctgcgcttcctggccgccgacacgctgcagaaggtggccgtcctcgcgctgctggcgctggcctcccgcggcctctcctccccgcgcgcgctcgggctcgactggagcatcacgctcttctccctctccacgctccccaacacgctcgtcatgggcatcccgctgctgcgaggcatgtacggcgcgtcgtcggccggcacgctcatggtccaggtcgtcgtcctccagtgcatcatctggtacacgctcatgctcttcctcttcgagtaccgcgccgcgcgcgcgctcgtcctcgaccagttccccgacggcgccgccgcgtccatcgtctccttccgcgtcgactccgacgtcgtctcgctcgccaggggggacgtcgagctcgaggccgagcccgacggcgtcgccggcgccggcgccgtctcctcccgcggcggggacgccgggcgggtgcgcgtcaccgtgcgcaagtccaccagctcgcgctccgaggccgcgtgctcgcactcgcactcccagaccatgcagccccgtgtgtccaacctctccggcgtggagatctactcgctgcagtcgtcgcgcaaccccaccccgcgcgggtccagcttcaaccacgccgacttcttcaacatcgtcggcgccgccgccaagggaggcggaggagcggcgggggacgaggagaagggcgcatgcggcggcggcggcggaggacactcgccgcagccgcaggccgtcgccgtgccggccaagaggaaggacctgcacatgctcgtctggagctccagcgcctcgcccgtgtccgagcgcgccgccgtgcacgtcttcggcgccggcggcgctgaccatgccgacgtcctcgccaaaggagcccaggcctacgacgagtacgggcgcgacgactacagcagcaggacgaagaacgggagcggcggcgcggacaagggcgggccgacgctgtcgaagctggggtccaactcgacggcgcagctgtaccccaaggacgacggcgaggggagggcggcggcggtggcgatgccgccggcgagcgtgatgacgcggctcatcctcatcatggtgtggaggaagctgatccggaaccccaacacctactccagcctcatcggcgtcgtctggtccctggtctcctacaggtggggcatcgagatgccagcgatcatcgcccggtcgatttcgatcctgtcggacgcgggtctcgggatggccatgttcagcctaggcctgttcatggcgctgcagccgaggatcatcgcgtgcgggaacaagctggcggccatcgcgatgggcgtccggttcgtcgcaggccccgcggtcatggccgccgcctccatcgccgtcggtctgcgcggcgtcctcctccacatcgccatcgtccaggctgctctgcctcaggggatcgtgccgttcgtgttcgccaaggagtacggcgttcatcccgacatcctgagcacagcgtatggtccaataacatcgcatggtttcatcacttgccatagttaacgggaaaaaaaagcagaagcaatcgatgacgacgcactgaattcactatgattcattactaatgatggtgtgttcatgcagtgcagtcaaagaaccactaataagcactgatctaggacagcatcagcatgattgattgcttgttttctcctgacaatctgcatttcttactacacagtgtgccttcactcatccatccagatgatcatacaacactactgatgcatctttttttttgattctgctgcagcgtgatcttcgggatgctcatcgctctgcccatcaccctggtctactacatcttgctggggctgtgagcctctctcgctcgcttcttcagcgtgcggaaggcgccatgctgtggtgtatcggccccacatgaaatttctgatgagcattagcgattactattagcttagcgaagaatgatgagatggtgtcggcctgtcgggactgggggagtcagaccagacccccctcgaacaaaagtttcttttggcttctgtccgtcagaaacaaaagttttggcttttggcatgcgcactcgaagcacagcagcagcagcagcatcatccatgagatgatactcctctcgaatcctagagctagcgaaggcaataataagataccacaaggcaatggaatcaacaaaagcttcatgcgacgcgctatcatatcaaggaacacatgcagaatacaacggagtctagtgcgcaatggcttcttctctttttttttcttgcgaaaagggtttctagactgattaaaggattccaaatagcatctctggattcgatttctttcgcagacaaattttctggcttttttagaaaaatcctctcgttgaaaaaaaaaaaaaaaaaaaaaaaaaaaaaag

SEQ ID NO: 28 - protein, 573 aa, Zea mays
MITALDLYHVLTAVVPLYVAMTLAYGSVRWWRIFTPDQCSGINRFVALFAVPLLSFHFISTNDPFAMNLRFLAADTLQKVAVLALLALASRGLSSPRALGLDWSITLFSLSTLPNTLVMGIPLLRGMYGASSAGTLMVQVVVLQCIIWYTLMLFLFEYRAARALVLDQFPDGAAASIVSFRVDSDVVSLARGDVELEAEPDGVAGAGAVSSRGGDAGRVRVTVRKSTSSRSEAACSHSHSQTMQPRVSNLSGVEIYSLQSSRNPTPRGSSFNHADFFNIVGAAAKGGGGAAGDEEKGACGGGGGGHSPQPQAVAVPAKRKDLHMLVWSSSASPVSERAAVHVFGAGGADHADVLAKGAQAYDEYGRDDYSSRTKNGSGGADKGGPTLSKLGSNSTAQLYPKDDGEGRAAAVAMPPASVMTRLILIMVWRKLIRNPNTYSSLIGVVWSLVSYRWGIEMPAIIARSISILSDAGLGMAMFSLGLFMALQPRIIACGNKLAAIAMGVRFVAGPAVMAAASIAVGLRGVLLHIAIVQAALPQGIVPFVFAKEYGVHPDILSTAYGPITSHGFITCHS

SEQ ID NO: 29 - DNA, 2324 bp, Glycine max
  CDS (166)..(2079)
gcacgagctttatcgtgagagttttgcctttatttctcagccatgtttccttcttttccagcttaaaccgctaccctacaaaacctttcacaattctctttcttcctagctatctctttctttctgtctacattgacctagctagctacaaaccctgcattaaccatgatcactggtaaggatatttatgatgttttcgcggctattgtgcccctctacgttgctatgatattagcatacggctcagttcggtggtggaaaattttcacacctgatcaatgttctggcataaaccgcttcgttgctgtgttcgcagttccacttctttctttccacttcatctcctccaatgacccttatgctatgaactaccacttcatagcagctgattgtcttcaaaaagttgtcattttgggtgctctctttctatggaacaccttcacaaaacatggtagcctagactggacaatcaccctcttctcactttcaacccttccaaacacacttgtcatggggatccctctattgaaggccatgtatggagacttctcagggagcctcatggtccaaattgtggtgttgcaaagtgtgatatggtataccctcatgctgttcatgtttgaatatagaggtgcaaaactcctcatcacagaacagttccctgagactgcaggctccataacttccttcagggttgactcagatgttgtctcactcaatggtagagagccacttcaaacagatgctgagataggagaagatggaaaacttcatgtggttgttaaaagatcagcagcttcttccatgatatcttcattcaacaagtctcatttaacttccatgacaccaagagcatctaacctcactggggttgagatctattctgttcagtcatcaagagaaccaaccccaagaggttcgagtttcaaccaaacggatttctatgccatgttcgcaagcaaggcaccgagtccaaaacatggctacacaaacagtttccagagtaataatggtggtattggtgacgtttactcgttgcagtcttcaaaaggggcaacgccaaggacttctaattttgaagaggagatgttgaagatgcacaagaagagaggagggaggagcatgagtggcgagttgtttaatgggggtttggtttcttctaattacccgccaccgaatccaatgttttcagggtctacgagtgctgctggtggccccaagaagaaagatagcagtggtggcggtggtgctgtagcacctaacaaggagttacacatgtttgtttggagttcaagtgcatcacctgtttctgaggggaatttgaggcatgcagttaatagagctgcctctactgactttggaactgtcgatccttctaaggctgttccacacgaaactgttgcctcaaaagctgttcacgaattgattgagaacatgagccctggtcgtagagggagtggagagagggagcctgaaatggatgaaggagccaaaattcccgcaagtggatctccatacacttgccagaagaaggtggacatggaagatggcaatgcaaacaaaaaccaacagatgccacctgcaagtgtcatgacaagacttattctcatcatggtttggaggaaactcataagaaatcctaatacttactccagtcttttgggactcacatggtctctcatatcatttaggtggcacattgaaatgccaactattgtaaaaggttccatctcaatactgtctgatgctggtctaggaatggccatgttcagtctaggtctattcatggcattacaaccgaagatcattgcctgtggaaaatctgtggcagcattttcaatggctgttaggttcttgacaggtccagctgtgattgctgcaacctcaataggcatcggactccgtggagttcttttgcatgttgcaattgtccaggctgctcttccccaaggtatcgttccctttgtgtttgccaaagaatacaatctccatgcagatatacttagcactgcggttatatttgggatgctaattgcattgcccataaccatactctactacgtgctgcttggagtttaatttgtcttgggagacaaaagcaatagaaaaagaagtatatgttgctataactgtacgtactatgtaaacccaatgtcacgctcaagcggggtggatgaagggaaatgtagaagatattggattttagatgttagagggaaagagaaattatatatagtatacggtagaatgctatatatattaattatttatgattcatatgaaaattttggtttgattcgttccacaaaaaaaaaaaaaaaaaa

SEQ ID NO: 30 - protein, 637 aa, Glycine max
MITGKDIYDVFAAIVPLYVAMILAYGSVRWWKIFTPDQCSGINRFVAVFAVPLLSFHFISSNDPYAMNYHFIAADCLQKVVILGALFLWNTFTKHGSLDWTITLFSLSTLPNTLVMGIPLLKAMYGDFSGSLMVQIVVLQSVIWYTLMLFMFEYRGAKLLITEQFPETAGSITSFRVDSDVVSLNGREPLQTDAEIGEDGKLHVVVKRSAASSMISSFNKSHLTSMTPRASNLTGVEIYSVQSSREPTPRGSSFNQTDFYAMFASKAPSPKHGYTNSFQSNNGGIGDVYSLQSSKGATPRTSNFEEEMLKMHKKRGGRSMSGELFNGGLVSSNYPPPNPMFSGSTSAAGGPKKKDSSGGGGAVAPNKELHMFVWSSSASPVSEGNLRHAVNRAASTDFGTVDPSKAVPHETVASKAVHELIENMSPGRRGSGEREPEMDEGAKIPASGSPYTCQKKVDMEDGNANKNQQMPPASVMTRLILIMVWRKLIRNPNTYSSLLGLTWSLISFRWHIEMPTIVKGSISILSDAGLGMAMFSLGLFMALQPKIIACGKSVAAFSMAVRFLTGPAVIAATSIGIGLRGVLLHVAIVQAALPQGIVPFVFAKEYNLHADILSTAVIFGMLIALPITILYYVLLGV

SEQ ID NO: 31 - DNA, 2292 bp, Arabidopsis thaliana
  CDS (102)..(1970)
gtctcgagtttttttttcttttttccctctcaccacttctctctcaaactaaagacaaaagctcttctctcttccctctctcttctccggcgaacaaaaagatgattacggcggcggacttctaccacgttatgacggctatggttccgttatacgtagctatgatcctcgcttacggctctgtcaaatggtggaaaatcttcacaccagaccaatgctccggcataaaccgtttcgtcgctctcttcgccgttcctctcctctctttccacttcatcgccgctaacaacccttacgccatgaacctccgtttcctcgccgcagattctctccagaaagtcattgtcctctctctcctcttcctctggtgcaaactcagccgcaacggttctttagattggaccataactctcttctctctctcgacactccccaacactctagtcatggggatacctcttctcaaaggcatgtatggtaatttctccggcgacctcatggttcaaatcgttgttcttcagtgtatcatttggtacatactcatgctctttctctttgagtaccgtggagctaagcttttgatctccgagcagtttccagacacagcaggatctattgtttcgattcatgttgattccgacattatgtctttagatggaagacaacctttggaaactgaagctgagattaaagaagatgggaagcttcatgttactgttcgtcgttctaatgcttcaaggtctgatatttactcgagaaggtctcaaggcttatctgcgacacctagaccttcgaatctaaccaacgctgagatatattcgcttcagagttcaagaaacccaacgccacgtggctctagttttaatcatactgatttttactcgatgatggcttctggtggtggtcggaactctaactttggtcctggagaagctgtgtttggttctaaaggtcctactccgagaccttccaactacgaagaagacggtggtcctgctaaaccgacggctgctggaactgctgctggagctgggaggtttcattatcaatctggaggaagtggtggcggtggaggagcgcattatccggcgccgaacccagggatgttttcgcccaacactggcggtggtggaggcacggcggcgaaaggaaacgctccggtggttggtgggaaaagacaagacggaaacggaagagatcttcacatgtttgtgtggagctcaagtgcttcgccggtctcagatgtgttcggcggtggaggaggaaaccaccacgccgattactccaccgctacgaacgatcatcaaaaggacgttaagatctctgtacctcaggggaatagtaacgacaaccagtacgtggagagggaagagtttagtttcggtaacaaagacgatgatagcaaagtattggcaacggacggtgggaacaacataagcaacaaaacgacgcaggctaaggtgatgccaccaacaagtgtgatgacaagactcattctcattatggtttggaggaaacttattcgtaatcccaactcttactccagtttattcggcatcacctggtccctcatttccttcaagtggaacattgaaatgccagctcttatagcaaagtctatctccatactctcagatgcaggtctaggcatggctatgttcagtcttgggttgttcatggcgttaaacccaagaataatagcttgtggaaacagaagagcagcttttgcggcggctatgagatttgtcgttggacctgccgtcatgctcgttgcttcttatgccgttggcctccgtggcgtcctcctccatgttgccattatccaggcagctttgccgcaaggaatagtaccgtttgtgtttgccaaagagtataatgtgcatcctgacattcttagcactgcggtgatatttgggatgttgatcgcgttgcccataactcttctctactacattctcttgggtctatgaagagatattaccaaaacacagggactttgttttattcttttgtgggatgatgaattgtgaaaagaacaatgccctttttgttgaaaacccacaaattaaatcagaagcagctttagagaatctttgaggataattgaagctcttgaagaagagaagaagaaggagacttaagtaggagctcagcaagttttacctttttcttaattttaatgaacattcgtgtttcctcttttggtaggttttaggaatttgtaaaagctttggctacttttagtgaattaaaaacgttaaggaaaatatcaaaaaaaaaaaaaaaaaaaaa

SEQ ID NO: 32 - protein, 622 aa, Arabidopsis thaliana
MITAADFYHVMTAMVPLYVAMILAYGSVKWWKIFTPDQCSGINRFVALFAVPLLSFHFIAANNPYAMNLRFLAADSLQKVIVLSLLFLWCKLSRNGSLDWTITLFSLSTLPNTLVMGIPLLKGMYGNFSGDLMVQIVVLQCIIWYILMLFLFEYRGAKLLISEQFPDTAGSIVSIHVDSDIMSLDGRQPLETEAEIKEDGKLHVTVRRSNASRSDIYSRRSQGLSATPRPSNLTNAEIYSLQSSRNPTPRGSSFNHTDFYSMMASGGGRNSNFGPGEAVFGSKGPTPRPSNYEEDGGPAKPTAAGTAAGAGRFHYQSGGSGGGGGAHYPAPNPGMFSPNTGGGGGTAAKGNAPVVGGKRQDGNGRDLHMFVWSSSASPVSDVFGGGGGNHHADYSTATNDHQKDVKISVPQGNSNDNQYVEREEFSFGNKDDDSKVLATDGGNNISNKTTQAKVMPPTSVMTRLILIMVWRKLIRNPNSYSSLFGITWSLISFKWNIEMPALIAKSISILSDAGLGMAMFSLGLFMALNPRIIACGNRRAAFAAAMRFVVGPAVMLVASYAVGLRGVLLHVAIIQAALPQGIVPFVFAKEYNVHPDILSTAVIFGMLIALPITLLYYILLGL

SEQ ID NO: 33 - DNA, 1983 bp, Arabidopsis thaliana
  CDS (1)..(1983)
atgatcaccggcaaagacatgtacgatgttttagcggctatggtgccgctatacgttgctatgatattagcctatggttcggtacggtggtgggggatattcacaccggaccaatgttccggtataaaccggttcgttgcggttttcgcggttcctcttctctctttccatttcatctcctccaatgatccttatgcaatgaattaccacttcctcgctgctgattctcttcagaaagtcgttatcctcgccgcactctttctttggcaggcgtttagccgcagaggaagcctagaatggatgataacgctcttttcactatcaacactgcctaacacgttggtaatgggaatcccattgcttagggcgatgtacggagacttctccggtaacctaatggtgcagatcgtggtgcttcagagcatcatatggtatacattaatgctcttcttgtttgagttccgtggggctaagcttctcatctccgagcagttcccggagacggctggttcaattacttccttcagagttgactctgatgttatctctcttaatggccgtgaacccctccagaccgatgcggagataggagacgacggaaagctacacgtggtggttcgaagatcaagtgccgcctcatcaatgatctcttcattcaacaaatctcacggcggaggacttaactcctccatgataacgccgcgagcttcaaatctcaccggcgtagagatttactccgttcaatcgtcacgagagccgacgccgagagcttctagctttaatcagacagatttctacgcaatgtttaacgcaagcaaagctccaagccctcgtcacggttacactaatagctacggcggcgctggagctggtccaggtggagatgtttactcacttcagtcttctaaaggcgtgacgccgagaacgtcaaattttgatgaggaagttatgaagacggcgaagaaagcaggaagaggaggcagaagtatgagtggggaattatacaacaataatagtgttccgtcgtacccaccgccgaacccaatgttcacggggtcaacgagtggagcaagtggagtcaagaaaaaggaaagtggtggcggaggaagcggtggcggagtaggagtaggaggacaaaacaaggagatgaacatgttcgtgtggagttcgagtgcttctccggtgtcggaagccaacgcgaagaatgctatgaccagaggttcttccaccgatgtatccaccgaccctaaagtttctattcctcctcacgacaacctcgctactaaagcgatgcagaatctgatagagaacatgtcaccgggaagaaaagggcatgtggaaatggaccaagacggtaataacgggggaaagtcaccttacatgggcaaaaaaggtagcgacgtggaagacggcggtcccggtcctaggaaacagcagatgccgccggcgagtgtgatgacgagactaattctgataatggtttggagaaaactcattcgaaaccctaacacttactctagtctctttggccttgcttggtcccttgtctctttcaagtggaatataaagatgccaacgataatgagtggatcgatttcgatattatctgatgctggtcttggaatggctatgtttagtcttggtctatttatggcattgcaaccaaagattattgcgtgcggaaaatcagtagcagggtttgcgatggccgtaaggttcttgactggaccagccgtgatcgcagccacctcaatagcaattggtattcgaggtgatctcctccatatcgccatcgttcagggttatattcggaatgctggttgctttgcctgtaacagtactctactacgttcttttggggctttaagttattatcaaaacgtatttgcaaataaaaggcgatacgacccaaaggtgattttttttcaaacgaaaaagaataattacaagaacgaaaaaagactaattccaggtcaggcttag

SEQ ID NO: 34 - protein, 660 aa, Arabidopsis thaliana
MITGKDMYDVLAAMVPLYVAMILAYGSVRWWGIFTPDQCSGINRFVAVFAVPLLSFHFISSNDPYAMNYHFLAADSLQKVVILAALFLWQAFSRRGSLEWMITLFSLSTLPNTLVMGIPLLRAMYGDFSGNLMVQIVVLQSIIWYTLMLFLFEFRGAKLLISEQFPETAGSITSFRVDSDVISLNGREPLQTDAEIGDDGKLHVVVRRSSAASSMISSFNKSHGGGLNSSMITPRASNLTGVEIYSVQSSREPTPRASSFNQTDFYAMFNASKAPSPRHGYTNSYGGAGAGPGGDVYSLQSSKGVTPRTSNFDEEVMKTAKKAGRGGRSMSGELYNNNSVPSYPPPNPMFTGSTSGASGVKKKESGGGGSGGGVGVGGQNKEMNMFVWSSSASPVSEANAKNAMTRGSSTDVSTDPKVSIPPHDNLATKAMQNLIENMSPGRKGHVEMDQDGNNGGKSPYMGKKGSDVEDGGPGPRKQQMPPASVMTRLILIMVWRKLIRNPNTYSSLFGLAWSLVSFKWNIKMPTIMSGSISILSDAGLGMAMFSLGLFMALQPKIIACGKSVAGFAMAVRFLTGPAVIAATSIAIGIRGDLLHIAIVQGYIRNAGCFACNSTLLRSFGALSYYQNVFANKRRYDPKVIFFQTKKNNYKNEKRLIPGQA

SEQ ID NO: 35 - DNA, 2571 bp, Eucalyptus grandis
  CDS (166)..(2124)
ctctcatggttctctccttgcttcgtcttcttcaccaaaatccaaactttccccacagaaactccacttcgcagcaagcgaaaactctgcactgcacatagtacgcagtacagttcaatccctcgtcgcttctccgcctgcttgacgaccgccgccgccgccgccatgatcaagtggcacgatctctacgcggtgctggtcgcggtggtgccgctctacgtggcgatgatcctggcctacggctccgtgcggtggtggaggatcttctcccccgaccagtgctccggcatcaaccgcttcgtcgccatcttcgccgtcccgctcctctcgttccacttcatctccaccaacgacccctaccgcatgaacctccgcttcatcgccgccgacaccctccagaagctcctcctcctcctcctcctcgccctctgggccaacctccaccgccgcggctccctggactggtccatcaccgtcttctccctctccaccctccccaacaccctcgtcatgggcatccctctcctcggcgccatgtacggcaccgaagctagcaacctcatggtccaggtggtcgtgctgcagtgcatcatctggtacaccctcctcctcttcctcttcgagtaccggggcgcgaagatcctcatcatggagcagttccccgagaccgccgcgtccatcgtgtccttcaatgtcgacccggacgtcgtctccctcgacggccggaacttcctcgagaccgacgcggaggtcggccaagacgggaagctgcacgtcacggtgaggaagtcgaacgcgtcgcggcggtccttcggcctggggcctggcggtggcggctcgttctccgggatgacgccgcggccttcgaacctcagcggcgtggagatctacagcctgagctcgtcgcggaacctgactccgaggggttccaactcggacttctactccatcatgggcgtgcctcggctctccaacttcggaccctccgacgcgtactccgtccagtcctcccggggcccgaccccgaggccatcgaacttcgacgagaacctgcagccgtccccgaagttcgggttctacccggcccaggtcgcgtccgccccgtacccggctccgatccccgatttcgcatcagcattcgcgaagagcggcaaacccaaccagcaacagcagcagccggcgccggcgccgccggagcagcaatctaacggcgcggcaaaggcaaacagttacgacgccaaggagctccacatgttcgtgtggagctccagcgcctcgccggtttcggaagtcggcgggctccacgttttcggcagcggcgatttcggggctccggacaatcaatccaggcgggccgatcacagcgtcaaggagatccggatgatggttgccgataataaccagcccaacggcgagaccaaaactgccccggaaacgacgggatttactgggcaagatcagttcaacttcgtggctaaagcagacgaaagggacgaggggaccggaggagagaaggaggcggccgggcccgaccggcccaacaagctctgcgcgagctcctccgccggagagccgggggggtacggcggcggcgacgacgccgggaacgacaagcagatgccgccggcgagcgtgatgacccgcctcatcttgatcatggtgtggaggaagctgatccggaaccccaacacctactcgagcctcatcggcatcatctggtccttgatcgccttccggtgggatgtgggaatgcccgagatcgtcgacaagtccatccacatactgtccgacgccgggctgggaatggccatgttcagcttgggtctgttcatggctcttcagcctaagctaattgcgtgcgggaactctgtcgccacgttcgccatggccgtcaggttcctcgttggcccagctgcgatggccatcgcctccgccgctatcggattgcgcgggcccctactccatatagccatcgtccaggcggcgcttccccagggaatcgtcccgttcgtgtttgccaaggagtacaacgttcatccggccgttctcagcaccatggtcatattcgggatgctgatagccctgccaatcacgcttgtctattacattcttctaggactataaaaaggattcctcctaaatatattcccacccccctatacacgagtcgcaaaggaagtgaatccgaagcataatccaatccgacaatggcgaaattgacgacaaatgggagaggcgattcggggaagcactcgtgaggatttcctgggattcttacacggggaagaacgaagcgacaaggggtgtaaaacgttaggcgaatcccccccctggaaaatagggttcatgtctccataagaggccaattagagctggtctgaattggttttttattatttttcttttgcaagtgttgattattgagtaagaaagaatatatatatatagagagagaacacctagctatgtagcttagtctaatgttttcaatggggacatgagggggtgggaaggaggttctacataagatatacccttcattatattattcctagattcctaaaaaaaaaa

SEQ ID NO: 36 - protein, 652 aa, Eucalyptus grandis
MIKWHDLYAVLVAVVPLYVAMILAYGSVRWWRIFSPDQCSGINRFVAIFAVPLLSFHFISTNDPYRMNLRFIAADTLQKLLLLLLLALWANLHRRGSLDWSITVFSLSTLPNTLVMGIPLLGAMYGTEASNLMVQVVVLQCIIWYTLLLFLFEYRGAKILIMEQFPETAASIVSFNVDPDVVSLDGRNFLETDAEVGQDGKLHVTVRKSNASRRSFGLGPGGGGSFSGMTPRPSNLSGVEIYSLSSSRNLTPRGSNSDFYSIMGVPRLSNFGPSDAYSVQSSRGPTPRPSNFDENLQPSPKFGFYPAQVASAPYPAPIPDFASAFAKSGKPNQQQQQPAPAPPEQQSNGAAKANSYDAKELHMFVWSSSASPVSEVGGLHVFGSGDFGAPDNQSRRADHSVKEIRMMVADNNQPNGETKTAPETTGFTGQDQFNFVAKADERDEGTGGEKEAAGPDRPNKLCASSSAGEPGGYGGGDDAGNDKQMPPASVMTRLILIMVWRKLIRNPNTYSSLIGIIWSLIAFRWDVGMPEIVDKSIHILSDAGLGMAMFSLGLFMALQPKLIACGNSVATFAMAVRFLVGPAAMAIASAAIGLRGPLLHIAIVQAALPQGIVPFVFAKEYNVHPAVLSTMVIFGMLIALPITLVYYILLGL

SEQ ID NO: 37 - DNA, 2121 bp, Eucalyptus grandis
  CDS (91)..(1857)
ctgaaacgcgtgccatttaagcccctcctcctcctcctcaagttcaccatccaaacgtctccctcttcttgatcaaccccgcgaggcacgatgatcacggggtcggacttctaccatgtcatgacggcgatggtgccgctgtacgtggcgatgatcctggcctacggctccgtccggtggtggcgcatcttcaccccggaccagtgctccggcatcaaccgcttcgtcgccctcttcgcggtccccctcctctccttccacttcatctcctccaacaaccctttcaccatgaacctccgcttcctcgccgccgactccctccagaagctcctcatcctcctcgccctcgccctctggtcccacctctcccgccgcggctccctcgactggtccatcaccctcttctccctctcaaccctcccaaacaccctcgtcatgggcatccccctcctccgcggcatgtacggcccctactccggtgacctcatggtccagatcgtcgtcctccagtgcatcatctggtacactcttatgctcttcctgttcgagttccgcgccgcccgaaccctcatctccaaccagttccctggcactgctgccgcgtccatcatctccatccgagttgatcctgacgtcgtctccgcttgtacggatccgcggcagtcccttgagaccgaggctgaggtaggcagtgatggcaagctccgtgtcaccgtccgccgctccagcgcctcgcggtcagacatcttcaagcccgcggcatggctctctccacggccgtcaaacctgaccaatgctgagatctactcactacagtcgtcgcggaacccaacgccaagagggtccagcttcaaccatgccgaactctactccgttgctgcggggctcggaggcggtgggaggggatcaaacttcgggtctgctgacgtgtacggcctatcagcaccgttcgggccaacgccgaggccatcaaattacgaagaggataaaccgaagttcccatatggcagcggaggcagcacggccggtagctaccccgccccaaatccagggatgttctcaccaaagaacaacggtgggagcggagggaagagggcgaatgtccaaggagggaagagaggagctgaagatggtggtggtggtggtcggagggatcttcacatgtttgtttggagctcaagtacttctccagtttctgatgtgtttgggaacaaccatgacttgcccaccggtgcaactcatgagaaagtggatcagaatcatattaaagaaggtgatcagctggagagagatgagttcagcttcaggaacagaaggccggagaatgtcgaagcgggtggcggggatgcgatgccaccaacgagtgtgatgacaaggctcatcttgatcatggtgtggaggaagctcatccggaaccctaacacctactccagcttgatcggcatcacttggtccctcgtctccttcaggtggcacatcgagatgcccgcaatcatagccaagtccatttccatactgtcagatgcaggacttggcatggccatgttcagccttggtctgttcatggcgttgcaacccaagatcatagcttgcgggaattccgtcgcaacttttgctatggccgtcagattcctcaccggtccggccgtcatggccgctgcctccctggtaatcggcctcaggggtgatctcctccgcgtcgccatcgtacaggcagctcttcctcaggggatcgtccccttcgtcttcgccaaagaatacggcctacacccggacattcttagcacagctgtcatattcgggatgttaatcgccttgccaattacactcgtctactacatttttctgggcatctgaagagcgaagaaaaaccctagaatctccgagagatgatgaagaatttggcttcttaatttgatcgccagtccacaggatcctgcagagaccatggagaacaaatcatagtgcaaatcaagctttcttctccaatggtatttttaggaaaattgtaaaatcatggttgtagttaatagaaattatctaccctgttcttttgagctataaagagaaatctaggaggagggaatgttatcccactccaaggtcaaagcaaaaaaaaaa

SEQ ID NO: 38 - protein, 588 aa, Eucalyptus grandis
MITGSDFYHVMTAMVPLYVAMILAYGSVRWWRIFTPDQCSGINRFVALFAVPLLSFHFISSNNPFTMNLRFLAADSLQKLLILLALALWSHLSRRGSLDWSITLFSLSTLPNTLVMGIPLLRGMYGPYSGDLMVQIVVLQCIIWYTLMLFLFEFRAARTLISNQFPGTAAASIISIRVDPDVVSACTDPRQSLETEAEVGSDGKLRVTVRRSSASRSDIFKPAAWLSPRPSNLTNAEIYSLQSSRNPTPRGSSFNHAELYSVAAGLGGGGRGSNFGSADVYGLSAPFGPTPRPSNYEEDKPKFPYGSGGSTAGSYPAPNPGMFSPKNNGGSGGKRANVQGGKRGAEDGGGGGRRDLHMFVWSSSTSPVSDVFGNNHDLPTGATHEKVDQNHIKEGDQLERDEFSFRNRRPENVEAGGGDAMPPTSVMTRLILIMVWRKLIRNPNTYSSLIGITWSLVSFRWHIEMPAIIAKSISILSDAGLGMAMFSLGLFMALQPKIIACGNSVATFAMAVRFLTGPAVMAAASLVIGLRGDLLRVAIVQAALPQGIVPFVFAKEYGLHPDILSTAVIFGMLIALPITLVYYIFLGI

SEQ ID NO: 39 - DNA, 1584 bp, Arabidopsis thaliana
  CDS (1)..(1584)
atgatcacatggcacgacctctacaccgtcctcacggcggtgataccactctacgtagccatgatcctcgcttacggctcagtccggtggtggaaaatcttctcaccagaccaatgttccggcataaaccgcttcgtcgctattttcgccgtccctcttctctctttccacttcatctcctcaaacaatccttacgcaatgaatctccgattcatcgcagccgatacactccaaaaactaatcatgctcactctcctaatcatctgggctaacttcactcgctccggtagtcttgaatggagcatcacaatcttctctctttcaacacttcccaacactctcgttatgggaatacctctcttgatcgccatgtacggagaatattccggctcactcatggttcagatcgttgttcttcagtgtataatctggtacacgcttcttctctttcttttcgaatacagaggagctaagatcttgatcatggaacagtttccagagactggtgcttcgattgtatcgttcaaagttgagtccgatgttgtttctttagatggacatgattttcttgaaactgatgctcaaatcggtgacgatggtaagcttcatgttacggtgagaaaatcaaacgcttctcggagatctttttacggtggtggtggtactaatatgactcctcgtccgtctaatctcaccggagctgagatttatagtcttaacactactccaagaggatctaacttcaatcattctgatttttactctatgatggggtttcccggtggccggctttcgaactttggtccggcggatatgtactctgttcagtcctcgagaggacctactcctagaccttcgaattttgaggagagttgtgctatggcttcttcgccaagattcgggtattacccgggaggagctcccgggtcgtacccagctcctaatccggagttttctaccggtaataaaaccggtagtaaagctccaaaagagaatcatcatcatgtaggaaaatcaaatagtaatgatgctaaggagcttcatatgtttgtttggggatccaacggatcacccgtttcggaccgagctggtcttcaagttgataatggagccaatgaacaagtcggaaaatccgatcaaggcggtgcaaaagagattcgaatgttgatctctgatcatactcaaaatgctggtccgatgaacggggactatggcggggaagaagagtcggagagggtaaaggaagtgcctaacggactacacaagcttcggtgtaactccacagcagagctaaaccctaaagaagctatagaaacgggtgaaactgtaccggtaaaacatatgccaccagcgagtgtgatgactcggctgatattgataatggtgtggaggaaactcataagaaacccaaacacttactctagtctcattggtctcatttgggctcttgttgctttcaggtgggatgtggcaatgcctaaaattattcaacaatcaatctcaattctttctgatgctggtcttggtatggcaatgttcagtttgggtgagtcatctttttactctgtttcttttttccgttaa

SEQ ID NO: 40 - protein, 527 aa, Arabidopsis thaliana
MITWHDLYTVLTAVIPLYVAMILAYGSVRWWKIFSPDQCSGINRFVAIFAVPLLSFHFISSNNPYAMNLRFIAADTLQKLIMLTLLIIWANFTRSGSLEWSITIFSLSTLPNTLVMGIPLLIAMYGEYSGSLMVQIVVLQCIIWYTLLLFLFEYRGAKILIMEQFPETGASIVSFKVESDVVSLDGHDFLETDAQIGDDGKLHVTVRKSNASRRSFYGGGGTNMTPRPSNLTGAEIYSLNTTPRGSNFNHSDFYSMMGFPGGRLSNFGPADMYSVQSSRGPTPRPSNFEESCAMASSPRFGYYPGGAPGSYPAPNPEFSTGNKTGSKAPKENHHHVGKSNSNDAKELHMFVWGSNGSPVSDRAGLQVDNGANEQVGKSDQGGAKEIRMLISDHTQNAGPMNGDYGGEEESERVKEVPNGLHKLRCNSTAELNPKEAIETGETVPVKHMPPASVMTRLILIMVWRKLIRNPNTYSSLIGLIWALVAFRWDVAMPKIIQQSISILSDAGLGMAMFSLGESSFYSVSFFR

SEQ ID NO: 41 - DNA, 1839 bp, Arabidopsis thaliana
  CDS (1)..(1839)
atgattacgtggcacgacttgtacaccgtcctcaccgccgtggtaccactttacgtagctatgattctcgcctacggatccgtacagtggtggaagatattctcaccagaccagtgctccggcatcaaccgcttcgtcgctatcttcgccgtccctctcctctccttccacttcatctccaccaacgatccttacgccatgaatttccgcttcgtcgccgccgacacgcttcaaaaaatcatcatgctcgtcttacttgctctatgggctaacctaaccaagaacggtagcttggagtggatgatcacaatcttctctctcagcactctcccaaacactcttgtcatggggatccctctgttgatcgccatgtacggaacctacgcaggttctctaatggtccaagtcgttgttcttcagtgtatcatttggtacactctccttctcttcctcttcgagtaccgtggcgctaagcttcttattatggagcagttcccggagactggtgcgtctattgtttcgtttaaagttgaatccgacgtcgtttctctcgacggtcatgattttcttgagacggatgctgagataggaaacgacgggaagcttcatgttaccgtgaggaaatcaaacgcatcgagacggtcactgatgatgactccacggccttcgaatcttaccggagctgagatctatagtcttagttcgactccgagaggttctaactttaaccattctgatttttactctgttatggggtttcccggcgggaggctttcgaattttggtccggcggatttgtactccgttcaatcttctcgtggtccgactccacggccttcgaacttcgaagagaacaacgccgttaaatatggattttacaataacactaacagttctgttccggcggccggttcgtacccggctccgaacccggagttttcaaccggtacgggtgtttcaactaaaccgaataaaattcctaaagaaaaccaacagcaactgcaagagaaagatagcaaagcgagccatgacgctaaggagcttcacatgtttgtttggagctcaagcgcttctccggtctccgacgtgtttggcggaggtgcaggcgacaacgtggcaacggaacaatctgaacaaggtgctaaggagattcggatggttgtctctgatcaacctcgaaagagtggtggtgatgatatcggcggtcttgatagtggagagggagaaagagagatagagaaagctacagcagggctgaataaaatggggtctaattccacggcggagctagaggcggctggtggagatggcggcggcaacaacggaacacatatgccgccgacaagtgtgatgacacgactgatattgataatggtgtggagaaagctgatcagaaacccaaacacgtactccagtctaatcggtctcatatgggctcttgttgcttaccggtggcatgtggctatgcccaaaatattacaacaatccatctccatactctcagatgctggtcttggaatggctatgttcagcttaggtttattcatggcacttcaacccaaaatcattgcttgtgggaactctgtcgccacgtttgccatggcggtcagatttataaccggtccggccatcatggctgttgctgggattgccattggcttacacggcgaccttctccgtatagccatcgttcaggctgcgttgcctcaaggaatagttccgtttgtgtttgcaaaagagtacaatgtgcatcccacgattctaagcactggggtcatatttggaatgttaatagccttacctataactctggtctactatattcttcttggcctttga

SEQ ID NO: 42 - protein, 612 aa, Arabidopsis thaliana
MITWHDLYTVLTAVVPLYVAMILAYGSVQWWKIFSPDQCSGINRFVAIFAVPLLSFHFISTNDPYAMNFRFVAADTLQKIIMLVLLALWANLTKNGSLEWMITIFSLSTLPNTLVMGIPLLIAMYGTYAGSLMVQVVVLQCIIWYTLLLFLFEYRGAKLLIMEQFPETGASIVSFKVESDVVSLDGHDFLETDAEIGNDGKLHVTVRKSNASRRSLMMTPRPSNLTGAEIYSLSSTPRGSNFNHSDFYSVMGFPGGRLSNFGPADLYSVQSSRGPTPRPSNFEENNAVKYGFYNNTNSSVPAAGSYPAPNPEFSTGTGVSTKPNKIPKENQQQLQEKDSKASHDAKELHMFVWSSSASPVSDVFGGGAGDNVATEQSEQGAKEIRMVVSDQPRKSGGDDIGGLDSGEGEREIEKATAGLNKMGSNSTAELEAAGGDGGGNNGTHMPPTSVMTRLILIMVWRKLIRNPNTYSSLIGLIWALVAYRWHVAMPKILQQSISILSDAGLGMAMFSLGLFMALQPKIIACGNSVATFAMAVRFITGPAIMAVAGIAIGLHGDLLRIAIVQAALPQGIVPFVFAKEYNVHPTILSTGVIFGMLIALPITLVYYILLGL

SEQ ID NO: 43 - DNA, 1227 bp, Oryza sativa (japonica cultivar-group)
  CDS (1)..(1227)
atgattacgggttcggaggtgtaccaggtggtggaggcgatggcgccgctgtacacggcggcggcgctggggtacgggtcggtgcggtggctgaaggcgttctccaacgagcagtgcgccgggatcaaccacttcgtggcgctctacgccgtgccggtgctcatcttcgacatggtgtccaccaacaacgtgtacaagatgaacggccgcctcatcgccgccgacacgctgcagaaggccgtgctgctgctgggcctcatggcgtgggcgctctgggagcggtcgcgcgcgcgcggcgccggggccaaggccaaggcggcggtgtcgtcgccgctgcagtgggtcatcacctgcttctccgtcgcgtcgctgcccaacaccatcatcatgggcgtcccgctcctcaacggcatgtacgggcccgtgtccaaggacctcatgaagcagatcgtcgtcatgcagttctgcatctggtacaacgtcatcatcttcctctacgagtacatggcggcgcgtagatcggcctcggcgccgccgccggcgtcgtcggagggcagcgccaagatcagcccttcgtcgccggtgaaagctgctgcggcggcggcggacacaaacggcaatgctgtcgcggccgaccggccgcaagaagtggcggtgaacatcgaaatcacggagatggcggcgtccacggcacgagacggcgtgtccggcgagacgacggcggccgccaaggaggtgagctctggtgaagttgctccggtggaagaggaggaggcgtctgcgccagcgccgtcgatgaagcacgtcatctggatggcggtgaagaagctgctacagattccgaatacctatgcaagcttccttggcctcatctggtctctaatcgcattcaagtgtggattctcgatgccaaaaatcgtcgaggactctctgttcaccattcgtaccaccgctgtaggcctaagcatgttttcttcagggacgttcatagcgcggcagtcgcggttcgtgccgtgcggatacaagatagcgtcgttctccatggtcatcaagtttctgataggcccggttgtgatgctgttcgcctcgctcgtcatcggcatgcacggcacacttctgcacatcgctgttgtgcaggcggctctccccctggcagtgacatcatttgtgtacgctgaagagtacaaggtccacgcagacatcatgagcacagggtttgtttcttaa

SEQ ID NO: 44 - protein, 408 aa, Oryza sativa (japonica cultivar-group)
MITGSEVYQVVEAMAPLYTAAALGYGSVRWLKAFSNEQCAGINHFVALYAVPVLIFDMVSTNNVYKMNGRLIAADTLQKAVLLLGLMAWALWERSRARGAGAKAKAAVSSPLQWVITCFSVASLPNTIIMGVPLLNGMYGPVSKDLMKQIVVMQFCIWYNVIIFLYEYMAARRSASAPPPASSEGSAKISPSSPVKAAAAAADTNGNAVAADRPQEVAVNIEITEMAASTARDGVSGETTAAAKEVSSGEVAPVEEEEASAPAPSMKHVIWMAVKKLLQIPNTYASFLGLIWSLIAFKCGFSMPKIVEDSLFTIRTTAVGLSMFSSGTFIARQSRFVPCGYKIASFSMVIKFLIGPVVMLFASLVIGMHGTLLHIAVVQAALPLAVTSFVYAEEYKVHADIMSTGFVS

SEQ ID NO: 45 - DNA, 1725 bp, Oryza sativa (japonica cultivar-group)
  CDS (1)..(1725)
atgatatccgggcacgacttctacacggtgatggcggcggtggtgccgctgtacgtggcgatgttcctggcgtacgggtcggtgcggtggtggggcatcttcacgccggaccagtgctccggcatcaaccgcttcgtcgccatcttcgccgtgccgctcctgtccttccacttcatctccaccaacgacccgtacgccatgaacctccgcttcctggcggcggacacgctgcagaagctgctcgtcctggcggggctcgccgcgtggtcgcgcctcccctcgcggaccggcgcgccgcggctggactggtccatcacgctcttctccctctccacgctgcccaacacgctcgtcatggggatcccgctgctgatcgccatgtacgggccatactccggctcgctcatggtccagatcgtcgtgctccagtgcatcatctggtacacgctgatgctcttcctcttcgagttccgcgccgcgcggatgctgatcgccgaccagttcccggacacggcggcgtccatcgtgtccctgcacgtcgacccggacgtggtgtcgctggagggcggccacgcggagacggaggccgaggtggcggcggacgggcggctgcacgtcaccgtgcgccggtcctcggtgtcgcggcggtcgctgctggtcacgccgcggccgtcgaacctgacgggagcggagatctactcgcttagctcgtcgcggaacccaaccccgcggggctccaacttcaaccacgccgacttcttcgccatggtcggcggcgggccaccgcccccgacgcccgctgcggtgcgcggctcgagcttcggcgcctccgagctctactcgctgcaatcgtcgcggggcccaaccccgaggcagtccaacttcgacgagcactcggcacggccgccgaaaccaccggcaacgaccacgggggcactcaaccacgatgccaaggagctccacatgttcgtgtggagctcgagcgcgtctcccgtctcagaagtcagcggcctgcctgtgttcagtggcggcggcggcggcggcgctctcgacgtcggcgccaaggaaatccacatggtcatccccgccgacctgccgcagaacaacggctcaggcaaagagcacgaggagtacggcgcagtggcattgggtggcggcggcggcggagagaacttcagcttcggaggcggcaagacggtggacggcgccgaggcagtagacgaggaggcggccttgcctgacgggctgacgaagatggggtcgagctcgacggcggagctgcacccgaaggtcgtcgacgtcgacggaccgaacgccggcggcggcgccgcgggcgcggggcagtaccaaatgccgccggcgagcgtgatgacacgcctcatcctcataatggtgtggcgcaagctcatccgcaaccccaacacttactccagcctcctcggcctcgcctggtccctcgtcgccttccggtggcacgtctccatgccagcaatcgtcgagaagtccatctccattctctcggacgcaggcctggggatggccatgtttagcctgggattgttcatggcgctgcagcccagcatcatcgcgtgtggcaaatcagccgccgtcgtctccatggccgtccgcttcctcgcgggccctgccgtcatggccgccgcgtcaatcgccatcggactccgcgggacgctcctgcacgtcgccattgttcaggtacatggttag

SEQ ID NO: 46 - protein, 574 aa, Oryza sativa (japonica cultivar-group)
MISGHDFYTVMAAVVPLYVAMFLAYGSVRWWGIFTPDQCSGINRFVAIFAVPLLSFHFISTNDPYAMNLRFLAADTLQKLLVLAGLAAWSRLPSRTGAPRLDWSITLFSLSTLPNTLVMGIPLLIAMYGPYSGSLMVQIVVLQCIIWYTLMLFLFEFRAARMLIADQFPDTAASIVSLHVDPDVVSLEGGHAETEAEVAADGRLHVTVRRSSVSRRSLLVTPRPSNLTGAEIYSLSSSRNPTPRGSNFNHADFFAMVGGGPPPPTPAAVRGSSFGASELYSLQSSRGPTPRQSNFDEHSARPPKPPATTTGALNHDAKELHMFVWSSSASPVSEVSGLPVFSGGGGGGALDVGAKEIHMVIPADLPQNNGSGKEHEEYGAVALGGGGGGENFSFGGGKTVDGAEAVDEEAALPDGLTKMGSSSTAELHPKVVDVDGPNAGGGAAGAGQYQMPPASVMTRLILIMVWRKLIRNPNTYSSLLGLAWSLVAFRWHVSMPAIVEKSISILSDAGLGMAMFSLGLFMALQPSIIACGKSAAVVSMAVRFLAGPAVMAAASIAIGLRGTLLHVAIVQVHG

SEQ ID NO: 47 - DNA, 1845 bp, Oryza sativa (japonica cultivar-group)
  CDS (1)..(1845)
atggtgccgttgtacgtggcgatgatactggcgtacgggtcggtgaagtggtggcgcatcttcacgccggaccagtgctccgggatcaaccgcttcgtggcgctcttcgccgtgccgctgctgtcgttccacttcatctccaccaacaacccgtacacgatgaacctccggttcatcgccgccgacacgctgcagaagctgatggtgctggccatgctcacggcgtggagccacctcagccgccgggggagcctcgagtggaccatcacgctcttctccctctccacgctgcccaacacgctcgtcatggggatccctttgctcaagggcatgtacggggagttctccggcagcctcatggtgcagatcgtcgtgctgcagtgcatcatctggtacacgctcatgctcttcatgttcgagtaccgcggcgcccggatgctcatcaccgagcagttcccggacaccgccgccaacatcgcctccatcgtcgtcgacccggacgtcgtgtcgctggacggcaggagggacgccatcgagacggagacggaggtgaaggaggacggcaggatacacgtcaccgtgcgccgctccaacgcgtctcgctcggacatctactcccgccgctccatgggcttctccagcaccacgccgcggccgagcaacctcaccaacgccgagatctactcgctgcagtcgtcgcggaacccgacgccgaggggttcaagcttcaaccacaccgacttctactccatggtgggccgcagctccaacttcggcgcggccgacgcgttcggcgtccgcaccggcgccacgccgcgcccgtccaactacgaggacgacgcgtccaagcccaagtacccgctcccggcgtcgaatgcggcgcccatggcgggccactacccggcgccgaacccggccgtgtcgtcggcgcccaagggcgccaagaaggcggccacgaacgggcaggccaagggcgaggacctccacatgttcgtctggagctccagcgcgtcgcccgtgtccgacgtcttcggcggcggcgcgccagactacaacgacgccgcggcagtcaagtccccccgcaaaagtagcaatcttttatcttcaccgtgtactatttgcctgatttggggagcatttcttgggctaatttgtactgactcgtatatttcttttacgtcagtggatggagcgaaggacagggaggactacgtggagcgggacgatttcagcttcgggaacaggggcgtcatggacagggacgcggaggcaggggacgagaaggcggcggcggcggcgggcgccgaccccagcaaggccatggcggcgccgacggcgatgccgccgacgagcgtgatgacccgcctcatcctgatcatggtgtggcgcaagctcatccgcaacccgaacacctactccagcctcatcggcctcatctggtccctcgtctgcttcaggtggaacttcgagatgccggccatcgtcctgaaatccatctcgatcctgtcggacgcggggctcggcatggccatgttcagtctcggtctgttcatggcgctgcagccgcacatcatcgcgtgcgggaacaaggtggcgacgtacgccatggcggtgcggttcctggccgggccggccgtgatggcggcggcgtccttcgccgtcggactccgtggcacgctcctgcacgtcgccattgtccaggcagctctgccccagggcattgtccccttcgtcttcgccaaggagtacagcgtgcaccctagcattctcagcacagctgtcatctttggcatgctcatcgccttgcctatcaccctcgtctactacatcttgcttgggctgtaa

SEQ ID NO: 48 - protein, 614 aa, Oryza sativa (japonica cultivar-group)
MVPLYVAMILAYGSVKWWRIFTPDQCSGINRFVALFAVPLLSFHFISTNNPYTMNLRFIAADTLQKLMVLAMLTAWSHLSRRGSLEWTITLFSLSTLPNTLVMGIPLLKGMYGEFSGSLMVQIVVLQCIIWYTLMLFMFEYRGARMLITEQFPDTAANIASIVVDPDVVSLDGRRDAIETETEVKEDGRIHVTVRRSNASRSDIYSRRSMGFSSTTPRPSNLTNAEIYSLQSSRNPTPRGSSFNHTDFYSMVGRSSNFGAADAFGVRTGATPRPSNYEDDASKPKYPLPASNAAPMAGHYPAPNPAVSSAPKGAKKAATNGQAKGEDLHMFVWSSSASPVSDVFGGGAPDYNDAAAVKSPRKSSNLLSSPCTICLIWGAFLGLICTDSYISFTSVDGAKDREDYVERDDFSFGNRGVMDRDAEAGDEKAAAAAGADPSKAMAAPTAMPPTSVMTRLILIMVWRKLIRNPNTYSSLIGLIWSLVCFRWNFEMPAIVLKSISILSDAGLGMAMFSLGLFMALQPHIIACGNKVATYAMAVRFLAGPAVMAAASFAVGLRGTLLHVAIVQAALPQGIVPFVFAKEYSVHPSILSTAVIFGMLIALPITLVYYILLGL

SEQ ID NO: 49 - DNA, 1719 bp, Oryza sativa (japonica cultivar-group)
  CDS (1)..(1719)
atgatatcgtggcacgagctgtacatggtgctgtcggcggtggtgccgctgtacgtggcgatgatggtggcgtacggctccgtgcggtggtggggcgtcctcacgccggagcagtgctccggcatcaaccgcttcgtcgccgtcatcgccgtcccgctcctctccttccacttcatctcctccagcgacccctacgccatgaacctccgcttcgtcgccgccgacaccctgcagaaggtgctcgtcctcgccgcgctcgccgcgtggtcgcgcttccccgcgcgcttcgtccccccggcgtggccgccgctcgactgctccatcacgctcttctccgtctccaccctccccaacacgctcgtcatggggatcccgctcctcgtctccatgtacggcccttactccggcgacctcatggtccagatcgtcgtgctccagtccatcgtctggtacacgctcctgctcttcctcttcgagttccgcgccgcgcgggtgctcatcgcggcgcagttcccggacaccgcggcgtccatcgccgccgtgcacgtcgacccggacgtggtgtcgctcgagggcagccaggcggaggcgcacgccgaggtggcgcccgacgggaggctgcgcatggtcgtgtgccgctcgtcggtgtcgaggcggtccgccgccgccgccgccacgccgcgcgcgtcgaacctgaccggcgtggagatctactcgatcagctcgtcgcggaacgccaccccgaggggctccaccttcaccctcgccgacatccctggtcaccagccgcccaacagcgcgctgcgcgcgtccagcttcggcgccgcggacctcttctcgctgcactcttcgtcgaggcagcacaccccgaggccgtccagcttcgacgagcacgcggcggcgcgggccagagcatccgcgaccgtggctcccaccaatgacctcaaggacacgcacatgatcgagtggagctccggcgcttccgccgcgtcggaggtcaccggcctgccggtgttccgcagcggccgggagacgcgccggcttgtcccctccgacgcgccatccattgcctcgtcgagagttatccgaccgccgccgggagcgacgggcggggagcgcgcggcgagcttcaacaaggccgtgggcgggcaggacgagctagcgaagctggaggccggcgccaagacggagcagcagacgacggcggtgactacgacgacgaagggcggcggcgcagcgggcgcggagcgggcgagagggcagcagaacgcgccggccggcgtgatgctgcggctcatcctcactacggtttggcgccggctgatccggaaccccaacacgtacgccagcctcatcggcctcacctggtcgctcatcgcgttccggttccacatcacgatgccaatcatagtagccaaatcaatctccattctctccgatgcagggttaggcatggccatgtttagcttaggattgttcatggccacgcagccgaagatcatcgcctgcggctactccgtcgcggcggccagcatgggcgtccgcttcttcttcggccccgccatcatggccgccgcgtccgccgccgtcggcatccgaggcacgctcttgcgtatcgccattgttcaggccgccctgccacaaggaattgtgccatttgtgttcgctaaggaatacaacctccacgctaccatcctttgcactttttgcagctgctaa

SEQ ID NO: 50 - protein, 572 aa, Oryza sativa (japonica cultivar-group)
MISWHELYMVLSAVVPLYVAMMVAYGSVRWWGVLTPEQCSGINRFVAVIAVPLLSFHFISSSDPYAMNLRFVAADTLQKVLVLAALAAWSRFPARFVPPAWPPLDCSITLFSVSTLPNTLVMGIPLLVSMYGPYSGDLMVQIVVLQSIVWYTLLLFLFEFRAARVLIAAQFPDTAASIAAVHVDPDVVSLEGSQAEAHAEVAPDGRLRMVVCRSSVSRRSAAAAATPRASNLTGVEIYSISSSRNATPRGSTFTLADIPGHQPPNSALRASSFGAADLFSLHSSSRQHTPRPSSFDEHAAARARASATVAPTNDLKDTHMIEWSSGASAASEVTGLPVFRSGRETRRLVPSDAPSIASSRVIRPPPGATGGERAASFNKAVGGQDELAKLEAGAKTEQQTTAVTTTTKGGGAAGAERARGQQNAPAGVMLRLILTTVWRRLIRNPNTYASLIGLTWSLIAFRFHITMPIIVAKSISILSDAGLGMAMFSLGLFMATQPKIIACGYSVAAASMGVRFFFGPAIMAAASAAVGIRGTLLRIAIVQAALPQGIVPFVFAKEYNLHATILCTFCSC

SEQ ID NO: 51 - DNA, 1821 bp, Lupinus albus
  CDS (1)..(1821)
atgataacattaatagatttctatcatgtcatgactgcaatggtgccactctatgtggctatgatcttagcctatggctcagtaaaatggtggaaaatcttctctcctgatcaatgctcaggcataaaccgttttgtggcactctttgcagtgccactcctttctttccacttcattgcctcaaacaacccttacaaaatgaaccttaggttcttagctgcagataccttacaaaagatcattgttttggttgttctagccatttggagcaacgtgaccaaaaggggttgtttggaatggaccataacactgttctctctttctaccctaccaaacacccttgttatgggtatccctttactcaaagggatgtatggtgagttctcagggagcttaatggtacaaattgtggtccttcaatgcatcatttggtacactttgatgttgttcatgtttgagtatagaggtgctaggatgttaatctctgaacagtttccagacactgctggcaccattgtctctatccatgttgattctgatgttatgtcacttgatggaagacaagttcttgaaactgaagctgagatcaaagaagatggaaagcttcatgtaactgttagaaaatccaatgcttcaagatcagatattttttcaagaaggtctcagggtctttcttcaacaactccaaggccttcaaatcttaccaatgctgagatatattctttgcaatcttctagaaaccctactccaagaggatctagtttcaaccacactgattgttattctatgatggctggtggtagaaactctaactttggtactaatgatgtttatggtttatctgcttcaagaggaccaactccaagggactctagttttgatgaagagggtggtgctggtaataacactaataataacaacaacaagacaaggtaccattacccttctggaacaggacactaccctgcaccaaaccccggcatgttctctcccaccactgcctctaaaaatcttcctcctaatgcaaatgttaatgctaagaggcctaatggtcaaaataaaccagaagatggtaataaggaccttcatatgtttgtttggagttcaagtgcttctccagtttcagatgtgtttggtgcacatgaatatgctgttcatgatcagaaagatgtgaaattgaatgtatctccaggaaaagtggagggtcatagaaactctactcaagaagagtaccttgaaaaagatgatttcagctttggaaatagaggaatagaccatgaatctgttgaagttggaaataacaagccaaaaactatgcctccagcaagtgtgatgacccggcttatattgattatggtgtggagaaaactcatcagaaaccccaatacatattctagtctaataggcctaatttggtcactagtttcattcaggtggaatgttgaaatgcctgcaattatagcaaaatctatttccattctgtcagatgcaggtcttggcatggctatgttcagtcttggtctgtttatggctttgcaaccaaagatcatagcatgtggaaattccaaagcagctttttcaatggctgtgagattccttacaggtccagctgtaatggcagctgcttccattactgttggcctaagaggcactctcttacacgttgccattgttcaggcagctctaccacaaggaattgtcccatttgtctttgcaaaggaatacaatgttcatcctgatattctaagcacaggagttatttttgggatgttgattgcattgcccataacgctcgtgtactacatattattggggctatga

SEQ ID NO: 52 - protein, 606 aa, Lupinus albus
MITLIDFYHVMTAMVPLYVAMILAYGSVKWWKIFSPDQCSGINRFVALFAVPLLSFHFIASNNPYKMNLRFLAADTLQKIIVLVVLAIWSNVTKRGCLEWTITLFSLSTLPNTLVMGIPLLKGMYGEFSGSLMVQIVVLQCIIWYTLMLFMFEYRGARMLISEQFPDTAGTIVSIHVDSDVMSLDGRQVLETEAEIKEDGKLHVTVRKSNASRSDIFSRRSQGLSSTTPRPSNLTNAEIYSLQSSRNPTPRGSSFNHTDCYSMMAGGRNSNFGTNDVYGLSASRGPTPRDSSFDEEGGAGNNTNNNNNKTRYHYPSGTGHYPAPNPGMFSPTTASKNLPPNANVNAKRPNGQNKPEDGNKDLHMFVWSSSASPVSDVFGAHEYAVHDQKDVKLNVSPGKVEGHRNSTQEEYLEKDDFSFGNRGIDHESVEVGNNKPKTMPPASVMTRLILIMVWRKLIRNPNTYSSLIGLIWSLVSFRWNVEMPAIIAKSISILSDAGLGMAMFSLGLFMALQPKIIACGNSKAAFSMAVRFLTGPAVMAAASITVGLRGTLLHVAIVQAALPQGIVPFVFAKEYNVHPDILSTGVIFGMLIALPITLVYYILLGL

SEQ ID NO: 53 - DNA, 576 bp, Arabidopsis thaliana
  CDS (1)..(576)
atggggtctaattccacggcggagctagaggcggctggtggagatggcggcggcaacaacggaacacatatgccgccgacaagtgtgatgacacgactgatattgataatggtgtggagaaagctgatcagaaacccaaacacgtactccagtctaatcggtctcatatgggctcttgttgcttaccggtggcatgtggctatgcccaaaatattacaacaatccatctccatactctcagatgctggtcttggaatggctatgttcagcttaggtttattcatggcacttcaacccaaaatcattgcttgtgggaactctgtcgccacgtttgccatggcggtcagatttataaccggtccggccatcatggctgttgctgggattgccattggcttacacggcgaccttctccgtatagccatcgttcaggctgcgttgcctcaaggaatagttccgtttgtgtttgcaaaagagtacaatgtgcatcccacgattctaagcactggggtcatacttggaatgttaatagccttacctataactctggtctactatattcttcttggcctttga

SEQ ID NO: 54 - protein, 191 aa, Arabidopsis thaliana
MGSNSTAELEAAGGDGGGNNGTHMPPTSVMTRLILIMVWRKLIRNPNTYSSLIGLIWALVAYRWHVAMPKILQQSISILSDAGLGMAMFSLGLFMALQPKIIACGNSVATFAMAVRFITGPAIMAVAGIAIGLHGDLLRIAIVQAALPQGIVPFVFAKEYNVHPTILSTGVILGMLIALPITLVYYILLGL

SEQ ID NO: 55 - DNA, 1119 bp, Populus tremula x Populus tremuloides
  CDS (1)..(1119)
atgtctcatggtctcaactcgggcctttcaatgactcctagaccgtctaatttaaccaacgcagagatatactcccttcaatcttctaggaatcctaccccaagagcctccagttttaaccatactgatttttattctatggttaatggcaagaatgcaagcaatgccagtccaagacactcgaacttcagtaacctgcaatttgatgaagaaagtggagggcctggggtgtttggtaatgttccaagagcaaatggaagcgcttatcctactccacctaatgctgggatcttttctcccgggggtaaaaagaaggcaaacgggactgagaatggcaaggatttgcatatgtttgtttggagttcaagcgcttcaccagtatcagaaggtggcctacatgtctttaggggaggggattatggcaatgaccttggtggggtagctaaccaaaaagattatgaagaatttggtcgagatgagttcagctttggaaacagacctgtacctaatggggtggaccgtgacggtccagtgctttctaagcttgcttcaagctccacagcggagctgcacccaaagagtgctgctaatggtgaaccgaagccaactgccatgcctcctactagcgttgtgacaagactgattctcattatggtgtggagaaaacttatcaggaatcccaatacttattccagtctaattgggctcacatggtctcttgtttcgttcaagtggggcttgaagatgcctcaaataattgctcattctatatctattctatccgatgctggtcttggaatggccatgtttagtcttggtttgttcatggcattgcagcctaggattattgcttgtggaaactcagttgctgcctttgccatgagtgttagattcctcactggtcctgcagtcatggccgctgcttcatttgctgttggactacgaggagttctactgcacattgccatagtgcaggcagctcttccacaagggattgtgccctttgtctttgcaaaggaatataatgttcatcctgacatactgagcactggagttatattcgggatgctaattgctttgccaatcacactggtttactatattttgcttggactttga

SEQ ID NO: 56 - protein, 372 aa, Populus tremula x Populus tremuloides
MSHGLNSGLSMTPRPSNLTNAEIYSLQSSRNPTPRASSFNHTDFYSMVNGKNASNASPRHSNFSNLQFDEESGGPGVFGNVPRANGSAYPTPPNAGIFSPGGKKKANGTENGKDLHMFVWSSSASPVSEGGLHVFRGGDYGNDLGGVANQKDYEEFGRDEFSFGNRPVPNGVDRDGPVLSKLASSSTAELHPKSAANGEPKPTAMPPTSVVTRLILIMVWRKLIRNPNTYSSLIGLTWSLVSFKWGLKMPQIIAHSISILSDAGLGMAMFSLGLFMALQPRIIACGNSVAAFAMSVRFLTGPAVMAAASFAVGLRGVLLHIAIVQAALPQGIVPFVFAKEYNVHPDILSTGVIFGMLIALPITLVYYILLGL

SEQ ID NO: 57 - DNA, 2142 bp, Physcomitrella patens
  CDS (1)..(2142)
atgattaacggccatgacatatacaatgttctcagtgccatggtacctttatacgtggcgatgatgttggcctacggctctgtgaagtggtgggggattttgacaccacagcaatgtggcggaatcaacagatttgtgtccattttcgccgtcccccttctatccttccagttcatctccggaaacaacccatacgcgatgaatttcaaattcattgcagccgatgcggtgtccaaggtgcttgttctcctatgcttgggtctctgggcacgatatgccaagcggggaagtctggaatggatgataacattgtttgtgctgatcacaatacccaataccctggtgatgggaacccctctgttggcagctatgtatggagctgggccaggcgatctcaccgtccaagcagtcgtcctgcagtgtataatctggtacactctcttacttgtaatgtacgagtatcgggctgcaaagattctaatcatgcagcagttcccagaaaacgctgcatctatcgtctccttcaaggtggactcagacgtgatgtccctggatgggcgggagccagtgctcacggaagctgaaataggcgatgatggcaaactgcacgtcaaggttcgaaggtctgtgtcatctaggtcgcagggtatgcactcagcgcaccactccatgccttcttcaaaggcactaacgccccgcccttccaaccttactggtgcagaaatctactccatgcattcctcagtgaatcttacgccacgagattcgagttttaaccagggcgaattccactccatgatgtcgcagcgaagccctcatcgtcagtcgaattttgacacttcggatgtctactccttgcaatcatctcgaggtcccacaccaagatcttccaatttcaacgaggaaaactcgaaggatatacacacgcatcaccgaggattgaacatgaattcccctcggttcgccccacctttgtatcggaacggaatgggggctaggatgttcacgccccgacctggccttggagggataggagtacctggcaccgattgcacaggacatgggactctaagcactttgggtgccccgggaatgggccctgatggtcgcaccatttatccaggaagccaaacagccatcaacattcttactcttggaggtgctgcaaacgtcaacgcaactgctccctcaactgctgtcaacactcagattgttaacccagtgtattcaccacaggcgtcacaaatcgcgaagaaggtgaaggatccaaaagcctctccaagggcggacgaggatgccaaggaacttcacatgtttgtgtggagcgcgaatgcatcccccgtctctgaagctggtttgcacgtctttggaggaaatgatacctctgctaatcttcagcaaagatttgacccaaaagaagtgcgcatgcttgtacatccacagttggaccgtggccttgctgcagcaagccctagaacgtatgatgaatacactcgagaggacttcagctttggaaacagaaacgatttgaaattggaggatcttgacaaggatggacctcggttggacaagtttggttcgacgtcgactgctgaattgacaccgaaactggcagaggacgaagcgaagaaaagcatgccaccttctgctgtgatgattaagctaattgcggtcatgaccttcagaaaacttgtttggaatccaaatacttactccagtttactcggggttatctggtcattggttgcaaataggtggcacctctctatgccgctgatcctttacaagtctgtgcacattctttcagatgcaggtcttgggatggcaatgtttagcctcggtctattcatgggattgggcgatcgtataattgtgtgcgggacgaaaatggcagtgtttgggatggctctgcgattcctggcaggcccagctgtatttgctgcagcctcttatttagtgggcctccgtggcgtgccgctcaaggtttccatagtgcaggctgcgttaccacagggcattgtaccatttgtgtttgcaaaggagtatggtgtgcatccagagatactaagcactgcggtgatctttggaatgcttattgcattgccaattacgatggtatactacatattacttggtctgtga

SEQ ID NO: 58 - protein, 713 aa, Physcomitrella patens
MINGHDIYNVLSAMVPLYVAMMLAYGSVKWWGILTPQQCGGINRFVSIFAVPLLSFQFISGNNPYAMNFKFIAADAVSKVLVLLCLGLWARYAKRGSLEWMITLFVLITIPNTLVMGTPLLAAMYGAGPGDLTVQAVVLQCIIWYTLLLVMYEYRAAKILIMQQFPENAASIVSFKVDSDVMSLDGREPVLTEAEIGDDGKLHVKVRRSVSSRSQGMHSAHHSMPSSKALTPRPSNLTGAEIYSMHSSVNLTPRDSSFNQGEFHSMMSQRSPHRQSNFDTSDVYSLQSSRGPTPRSSNFNEENSKDIHTHHRGLNMNSPRFAPPLYRNGMGARMFTPRPGLGGIGVPGTDCTGHGTLSTLGAPGMGPDGRTIYPGSQTAINILTLGGAANVNATAPSTAVNTQIVNPVYSPQASQIAKKVKDPKASPRADEDAKELHMFVWSANASPVSEAGLHVFGGNDTSANLQQRFDPKEVRMLVHPQLDRGLAAASPRTYDEYTREDFSFGNRNDLKLEDLDKDGPRLDKFGSTSTAELTPKLAEDEAKKSMPPSAVMIKLIAVMTFRKLVWNPNTYSSLLGVIWSLVANRWHLSMPLILYKSVHILSDAGLGMAMFSLGLFMGLGDRIIVCGTKMAVFGMALRFLAGPAVFAAASYLVGLRGVPLKVSIVQAALPQGIVPFVFAKEYGVHPEILSTAVIFGMLIALPITMVYYILLGL

SEQ ID NO: 59 - DNA, 1776 bp, Medicago truncatula
  CDS (1)..(1776)
atgataagtgctttagacttataccatgtcctcacagcagtagtaccactctatgtagcaatgatccttgcctatggttctgtaaaatggtggaaaatcttcacaccagatcaatgttcaggcataaaccgttttgtagcactttttgcagttccacttctctcattccacttcatctcaaccaacaatccttacactatgaactacaggttcatagcagctgattcacttcaaaaaactatcatcctaacactccttttcatttggtcaagaacaagctccagagggtcattagaatggtctataacactgttctcactttcaacacttcctaacacacttgttatgggcattcctttgttgaaaggaatgtatggtgatgattctggtacccttatggttcaaatagttgttcttcaatgtatcatttggtatacattgatgttgtttttgtttgagtataggggtgctaggattctcattgttgaacagtttcctgatactgctggttctattatatcattcaaagttgattctgatgttctttctttggatggtaaagagccacttcaaactgaagctgaagttggtgaagatggtaaacttcatgtgaaagttagaaaatcaactagttcaagaagtgagattttttctagaaggtctcatggtgttaactctggtgtttctttgacaccaagaccttctaatttgactaatgctgagatttattctcttcaatcttctagaaatcctacaccaagagggtctagttttaatcatactgatttttattctatggtgaataatggaagaaatgttagtcctagacaatctaactttggaagtttaggttttgatgaggaaagtggtgttgctaaagctaatggaaatggtggaaatggctaccctgctcctcatagtgcagggattttttcacctgtggctaataagaaaaagggtcatggtggtggtgctggtgatggtggaaaagatcttcatatgtttgtttggagttcaagtgcttcacctgtttctgaaggtggaatccatgtctttagaggtggtggtgattatggaaatgatcagcttaatggagtagctcaccaaaaagattatgaagaatttggtcatgatgagtttagctttggaaatagaactgttgctaatggtgtggacaaagaaggaccagtgctatccaaacttggttcaagctcaactactgagcttcatcctaaagctggatctcaaggtgaagctaagccaacaaacatgccacctgctagtgttatgacaagactcattttgattatggtgtggaggaaattgattaggaatcctaatacttattccagccttattggtcttacctggtccctggtctcattcaggtggaatgttgttatgcctgctattgttgctaaatcgattgcaattttatctgatgctggccttggaatggctatgtttagccttgggttgttcatggcattgcaaccaaggattattgcttgtggaaacaccgttgcttctttcgcgatggcggttcgcttccttaccggccctgctgtcatggctttttcttcatttgttgtaggactcaggggagttctgttgcacattgctattgtacaggctgctcttccccaaggaatagtcccttttgtgtttgccaaggaatacaatgttcatcctgacattcttagcactggggttatatttggaatgctaattgctcttcctatcacattagtttactacattttattgggactttga

SEQ ID NO: 60 - protein, 591 aa, Medicago truncatula
MISALDLYHVLTAVVPLYVAMILAYGSVKWWKIFTPDQCSGINRFVALFAVPLLSFHFISTNNPYTMNYRFIAADSLQKTIILTLLFIWSRTSSRGSLEWSITLFSLSTLPNTLVMGIPLLKGMYGDDSGTLMVQIVVLQCIIWYTLMLFLFEYRGARILIVEQFPDTAGSIISFKVDSDVLSLDGKEPLQTEAEVGEDGKLHVKVRKSTSSRSEIFSRRSHGVNSGVSLTPRPSNLTNAEIYSLQSSRNPTPRGSSFNHTDFYSMVNNGRNVSPRQSNFGSLGFDEESGVAKANGNGGNGYPAPHSAGIFSPVANKKKGHGGGAGDGGKDLHMFVWSSSASPVSEGGIHVFRGGGDYGNDQLNGVAHQKDYEEFGHDEFSFGNRTVANGVDKEGPVLSKLGSSSTTELHPKAGSQGEAKPTNMPPASVMTRLILIMVWRKLIRNPNTYSSLIGLTWSLVSFRWNVVMPAIVAKSIAILSDAGLGMAMFSLGLFMALQPRIIACGNTVASFAMAVRFLTGPAVMAFSSFVVGLRGVLLHIAIVQAALPQGIVPFVFAKEYNVHPDILSTGVIFGMLIALPITLVYYILLGL

SEQ ID NO: 61 - DNA, 1599 bp, Medicago truncatula
  CDS (1)..(1599)
atgattaccggcaaggacatatacaatgttttagcggcgattgtgccactatatgtcgctatgatattagcatatggttcggtccgatggtggaaaatcttcacaccagatcaatgttctggaataaaccgttttgtctcggtttttgcagttccgttactatcattccattttatttcatccaatgatccttatgctatgaattaccatttcttagcagccgattcacttcaaaaagtagttatccttggtgctctttttatatggaacacattctcaaaaaaccaagatagtcttgattggaccattacacttttctccatttcaactcttcctaacacacttatcatgggaatccctcttttaaaagccatgtatggtgatttctcaggaaatcttatggtacaaattgttgttctgcaaagtgttatctggtacacactcattcttttcttgtttgaatatagagctgctaaacttcttatttcagaacagtttccagaaactgcagcttctataacatcattcaaagttgattctgatgttgtttcgcttaacggtagagaaacacttcaaactgatgcagagacaggtgaagatggtaaacttcacgttgttgttaaaagatcaactacaaactctattgcatctggatcgtttaacaaatctcatttaaataatatgacgctgcgagcttcaaatcttacaggtgttgagatatattcggttcaaacatcaacagaaccaacaccgagagcttctggttttaaccaaactgatttttatatgcctccgagtccaaaaaatggttacccaaatagtgttcggagtaatggtaatggtactaatggtgatgtttactctgtgcaatcttcgaaaggggcaacacctcagtattcaataccagaagatgagaattcgaagatgaataggaataggagagggcggagtatcggtggtttgatggagaacatgagtgatagtcgaagagaaagagactttgaaattgaggaagaaacaaagtctccatatattagccagaagaaggtggacttggaaggagttggggatgtaaacaaaaacaaacagatgccaccagcaagtgtgatgacaaaactcatcctcttcatggtttggagaaaactcatcagaaatcctaacacatacgcaagtcttatcggacttgtttggtctcttatatcatttgggttgcacattgaaatgccctcgattgtaaacggttccatctcaatactatctaatactggtcttggaatggccatgtttagtctaggtttgttcatgggattacaacctaagctgatttcacgtgggaaaaaaattgcaacatattctatggctgtaaggttcttggtcggtccagctgtgattgcggcaacctcgttagcagttggtctccgtggagttctcttacatgttgcaattgttcaggctgctcttccccaagctatcgttccctttgtgtttgccaaagaatacaatatccatccaaacatactcggtactggggttatatttggaatgttgattgcattgccaataacagtactccactatgtaattcttgcattactgtaa

SEQ ID NO: 62 - protein, 532 aa, Medicago truncatula
MITGKDIYNVLAAIVPLYVAMILAYGSVRWWKIFTPDQCSGINRFVSVFAVPLLSFHFISSNDPYAMNYHFLAADSLQKVVILGALFIWNTFSKNQDSLDWTITLFSISTLPNTLIMGIPLLKAMYGDFSGNLMVQIVVLQSVIWYTLILFLFEYRAAKLLISEQFPETAASITSFKVDSDVVSLNGRETLQTDAETGEDGKLHVVVKRSTTNSIASGSFNKSHLNNMTLRASNLTGVEIYSVQTSTEPTPRASGFNQTDFYMPPSPKNGYPNSVRSNGNGTNGDVYSVQSSKGATPQYSIPEDENSKMNRNRRGRSIGGLMENMSDSRRERDFEIEEETKSPYISQKKVDLEGVGDVNKNKQMPPASVMTKLILFMVWRKLIRNPNTYASLIGLVWSLISFGLHIEMPSIVNGSISILSNTGLGMAMFSLGLFMGLQPKLISRGKKIATYSMAVRFLVGPAVIAATSLAVGLRGVLLHVAIVQAALPQAIVPFVFAKEYNIHPNILGTGVIFGMLIALPITVLHYVILALL

SEQ ID NO: 63 - DNA, 1584 bp, Medicago truncatula
  CDS (1)..(1584)
atggtgacaagagaagatttatacaacgtgatgtgtgcaatggtacctctatattttgcaatgttagttgcttatggttcagtaaagtgttgcaaaatgttcaccccagatcaatgttccggcataaaccgattcgtcgcagtttttgctgttccagttctatcttttcacttcatttctctcaacaatccttatcaaatggacacaaaatttatcttggcagatacaatttctaagctacttgttctattttttcttaccatttgggccattttctttactaaaggctcattggattgggttataactttattctcagtggctactttgcctaatacccttgttatgggtatccctcttcttcaagctatgtatggtgattttacacaaagtctcatggtgcaactagttgttcttcaatgtattatatggtatactctgcttctattcctactagaatacagagcagccaaactcttaatcaaaagccagtttccaggaacaacagcagcctccataacaaaaatctccctcgacgacgacgtaatttccctctacagccacgacgcaccgctcacaacgcaatcagaaaccgacgaaaatggcagaatcaaagtccgaatccgacgctccatttcctcagcaccaccagaatcaacttcctcattgggtaaaagctttactcctacaagactctccaatctctccaacgccgacatcttctccatcaacacgccggggaattttctcgataatatgacaagtccacagctgtctggttatgcttcaacggacgcttattccttgcagccgacgcctagggcgtcgaattttaatgaaatggagatagttggcggtggtacgcctgtttgggggaggtctccggtggccggaggtagggttttggatggagggatggtagtgtgggaatcacctgagaaatggcggggagatgggggacatggatgcaaggacattactatgtcagataaagaaattagcttcagagacagcctcaaagtctcagtggcaggggaagttgtggaccccaaagaccaaattgccagtagcccgaaaatgccatatgcctttgtaatgttaaggcttatacttattgtagctggaagaaaactttctagaaatcctaacacatattctagtctattaggacttctatggtctctaatctccttcaaatggaatatagaaatgcccagtttgatcaaatcatctatcaagatcatatctgatgcaggtcttgggatggcaatgtttagcttagggcttttcatggctcttcagcctcgtatcattgcttgtggcaccaaaagagcagccatgggaatggccattagatttctatttgggcctcttgtaatgtccttatcctcgattgccgttggattgagagggaaaaaattgcatactgcaattgtacaggctgctcttccacaaggaatagttccatttgtatttgcaagagaatatgggctgcatcctgatattttgagcacaggggtaatctttggcatgttaatttccttgccaataactctcatttactacatatttcttggcttgtga

SEQ ID NO: 64 - protein, 527 aa, Medicago truncatula
MVTREDLYNVMCAMVPLYFAMLVAYGSVKCCKMFTPDQCSGINRFVAVFAVPVLSFHFISLNNPYQMDTKFILADTISKLLVLFFLTIWAIFFTKGSLDWVITLFSVATLPNTLVMGIPLLQAMYGDFTQSLMVQLVVLQCIIWYTLLLFLLEYRAAKLLIKSQFPGTTAASITKISLDDDVISLYSHDAPLTTQSETDENGRIKVRIRRSISSAPPESTSSLGKSFTPTRLSNLSNADIFSINTPGNFLDNMTSPQLSGYASTDAYSLQPTPRASNFNEMEIVGGGTPVWGRSPVAGGRVLDGGMVVWESPEKWRGDGGHGCKDITMSDKEISFRDSLKVSVAGEVVDPKDQIASSPKMPYAFVMLRLILIVAGRKLSRNPNTYSSLLGLLWSLISFKWNIEMPSLIKSSIKIISDAGLGMAMFSLGLFMALQPRIIACGTKRAAMGMAIRFLFGPLVMSLSSIAVGLRGKKLHTAIVQAALPQGIVPFVFAREYGLHPDILSTGVIFGMLISLPITLIYYIFLGL

SEQ ID NO: 65 - DNA, 1761 bp, Triticum aestivum
  CDS (1)..(1761)
atgatcacgggcacggacttctaccacgtcatgacggcgatggtgccgctgtacgtggcgatgatgctcgcgtacggctccgtcaagtggtggggcatcttcacgccggaccagtgctccgggatcaaccgcttcgtcgcgctcttcgccgtgccgctgctctccttccacttcatctccaccaacaacccctacaccatgaacctccgcttcatcgccgccgacacgctgcagaagctcatcgtgctcgcgctgctcacgctctggagccacctctcccgcaacggctccctcgagtggaccatcacgctcttctccctctccacgctgcccaacaccctcgtcatgggcatcccgctcctcaagggcatgtacggcgacgagtccggcagcctcatggtgcagatcgtggtgctccagtgcatcatctggtacacgctcatgctcttcatgttcgagtaccgcggggccaggatccccatcaaccgagcagttcccgacaccgccggcgccatcgcctccatcgccgtcgacccggacgtcatgtcgctcgacggcaggagggacatgatcgagacggaggcggaggtcaaggaggacggcaagattcacgtcaccgtgcgccgctccaacgcctcccgctccgacatatactcgcgccgctccatggggttctccagcaccacgccgcgccccagcaacctcaccaacgccgagatctactcgctgcagtcgtcgcggaaccccacgccccggggctccagcttcaaccacaccgacttctactccatggtgggccgcagctccaacttcgccgccggggacgcgttcggcccggtggtgcgcaccggcgccaccccgcgtccgtccaactacgaggaggacaaggccggcaacaacaacaacagcaagtacgggcagtacccggcgcccaaccccgcgatggcggcgccgcagaagccggccaagaaggcggccaacgggcaggccaagggcgaggacggcaaggacctgcacatgttcgtgtggagctccagcgcgtcgcccgtgtccgacgtgttcggcaacggcaccgaggcgtacaacgacgccgccgccaaggacgtccgcgtggccgccgcctcgccgcgcaaagcggacggcgtggagcgtgacgagttcagcttcgggaacaaggagagggacgcggaggccggcgacgagaaggccgcggcggagcagggcaccgcgggcctggtggcggcgcccacggtgatgccgccgaccagcgtgatgacccgcctcatcctcatcatggtgtggcgcaagctcatccgcaaccccaacacctactccagcctcatcggcctcatctggtccctcgtctgcttccggcggaacttcgtcatgccggcgatcatcatgaagtccatcgccatcctgtccgacgccggcctcggcatggccatgttcagcctcgggctgttcatggcgctgcagccgcggatcatcgcgtgcgggaacaagcgggcgacgttcgccatggccgtgcggttcttgaccggcccggccgtcatggccgccgcctccatcgccgtcggcctccgcggcacactcctccagatcgccatcgtgcaggcagcgctgccccagggcattgtccccttcgtcttcgccaaggagtacagcgtgcaccccgacatcctcagcacggctgtcatcttcggcatgctcatcgcgctgcccatcacgctggtctactacatcctgctcggcctgtga

SEQ ID NO: 66 - protein, 586 aa, Triticum aestivum
MITGTDFYHVMTAMVPLYVAMMLAYGSVKWWGIFTPDQCSGINRFVALFAVPLLSFHFISTNNPYTMNLRFIAADTLQKLIVLALLTLWSHLSRNGSLEWTITLFSLSTLPNTLVMGIPLLKGMYGDESGSLMVQIVVLQCIIWYTLMLFMFEYRGARIPINRAVPDTAGAIASIAVDPDVMSLDGRRDMIETEAEVKEDGKIHVTVRRSNASRSDIYSRRSMGFSSTTPRPSNLTNAEIYSLQSSRNPTPRGSSFNHTDFYSMVGRSSNFAAGDAFGPVVRTGATPRPSNYEEDKAGNNNNSKYGQYPAPNPAMAAPQKPAKKAANGQAKGEDGKDLHMFVWSSSASPVSDVFGNGTEAYNDAAAKDVRVAAASPRKADGVERDEFSFGNKERDAEAGDEKAAAEQGTAGLVAAPTVMPPTSVMTRLILIMVWRKLIRNPNTYSSLIGLIWSLVCFRRNFVMPAIIMKSIAILSDAGLGMAMFSLGLFMALQPRIIACGNKRATFAMAVRFLTGPAVMAAASIAVGLRGTLLQIAIVQAALPQGIVPFVFAKEYSVHPDILSTAVIFGMLIALPITLVYYILLGL

SEQ ID NO: 67 - DNA, 1905 bp, Momordica charantia
  CDS (1)..(1905)
atgatcaccggcaaggatttgtacactgtcttgaccgcggtgattcctctgtacgtcgccatgattttggcctatggctccgttcgttggtggaagatcttctcgcccgaccagtgctccggcatcaaccgattcgtcgccatctttgctgtgccgttgctttctttccatttcatttccactaacgatccgtacgctatgaacttccggtttgttgcggcggatactctgcagaagatcattatgcttgctgcgctcacagtttgggccaatttcaccaagaatgggagtctcgagtggttgatcaccattttctcgctctctacgctgccgaatacactcgtgatggggattcctctgctgcaggctatgtatggcggtaactctgggagtttgatggttcaggtcgttgtgttgcagtgcattatttggtatacgcttctgctttttctgttcgagtatcgtggagcgaagattttgattatggagcaatttcctgaaactgctgcttccattgtgtcgttcaaggttgattcggatgttgtttcgttggatgggagggattttcttgagacggacgcggagattgggaatgacggcaagcttcatgtgacggtcaggaaatcgaacgcgtctcggcggtcgttaggtccgtgctcgctcccggcgttgacgcctcggccatcgaatctcaccggagcggagatttacagtctcagctcttccaggaaccctacgccgcgaggttcgaatttcaaccacgcggatttctactctctgatgggatatcaaggacggcactcgaatttcggtcagccggagttgtattccgttcaatcctcgagaggtccgacgccgcggccgtcgaattttgaggagaattgcgctgttccgacggctaattctccgaggttcgggttctatccagctcaaacggcggcgacgacttacccggcgccgaatccagagttcacgaagagcgggaaaacacagcagccgcaggcgccgccgccgccgcagaatggtggtccgacgagcaaacccagccatgacgcgaaggagcttcacatgttcgtgtggagctcgagcgcttcaccagtttcagaaagcgatggcctccacgtattcggcgggtccgatttcggagctactgaacaaactgggcgttccgatcaaaacgccaaggaaatcagaatgttcatcgccgatcacccgcagaatgtggaaaagaaagttcttgaaagtgagcggttcagaggggaagagttgaatttcgcaggaagagcagaggtagacgacgagaaagaagaaaagggccctattggtggacttcataagctggggtccgccgccgccgccgccgccgccggagctccggagagtggggcggcgaaacaaatgcctccgacgagcgttatgacccgtctgatcttaatcatggtgtggcgcaagcttattcgaaatccaaacacgtactcaagtctcattggccttgcttggtctcttattgccttccgttggcatgtgtctatgcccaaaataattgagaaatcaatctccattctgtctgatgctggccttggcatggcaatgttcagcttaggtatattcatggctttacaaccgaaactaattgcttgtggcaactccattgcttccttcgccatggcggtgaggttcctcaccggcccggctgtgatggcggccgcttcggttgctgttggtctgcatggcaacctcctccgcgtcgccattgttcaggccgcattgccccaaggaattgttccctttgtttttgctaaagagtacaatgtccaccctgccattcttaacaccgcagtcatattcgggatgttgatagcactgccgatcaccctcgtctactacatccttctcgggttgtaa

SEQ ID NO: 68 - protein, 634 aa, Momordica charantia
MITGKDLYTVLTAVIPLYVAMILAYGSVRWWKIFSPDQCSGINRFVAIFAVPLLSFHFISTNDPYAMNFRFVAADTLQKIIMLAALTVWANFTKNGSLEWLITIFSLSTLPNTLVMGIPLLQAMYGGNSGSLMVQVVVLQCIIWYTLLLFLFEYRGAKILIMEQFPETAASIVSFKVDSDVVSLDGRDFLETDAEIGNDGKLHVTVRKSNASRRSLGPCSLPALTPRPSNLTGAEIYSLSSSRNPTPRGSNFNHADFYSLMGYQGRHSNFGQPELYSVQSSRGPTPRPSNFEENCAVPTANSPRFGFYPAQTAATTYPAPNPEFTKSGKTQQPQAPPPPQNGGPTSKPSHDAKELHMFVWSSSASPVSESDGLHVFGGSDFGATEQTGRSDQNAKEIRMFIADHPQNVEKKVLESERFRGEELNFAGRAEVDDEKEEKGPIGGLHKLGSAAAAAAAGAPESGAAKQMPPTSVMTRLILIMVWRKLIRNPNTYSSLIGLAWSLIAFRWHVSMPKIIEKSISILSDAGLGMAMFSLGIFMALQPKLIACGNSIASFAMAVRFLTGPAVMAAASVAVGLHGNLLRVAIVQAALPQGIVPFVFAKEYNVHPAILNTAVIFGMLIALPITLVYYILLGL

SEQ ID NO: 69 - DNA, 1824 bp, Momordica charantia
  CDS (1)..(1824)
atgattagccttttagatttctaccatgtaatgaccgcagtggttcctctttatgtggccatgatcttagcttatggctctgtgaaatggtggaaaatcttcactcccgaccaatgctctggaatcaaccgtttcgttgctctgtttgcggtccctcttctctcttttcacttcatctccaccaacaatccctataccatgaacctccgctttattgctgcagatactctccaaaaactcattgttctcgctgttcttgccgtttggagcaacataagcaaaagagggtgtttagagtggactattactctgttttccctttccactctgccaaatactctggttatggggattcctctgctgaaggggatgtatggggagttttctgggagtttgatggttcagattgttgtgctgcagtgcattatttggtacacattgatgctgttcatgtttgaatacagaggagccagaatgctgatttctgagcaatttccagacactgctggctccatagtctcaatccatgtcgattctgacattatgtcgttggatggaaggcaagttttggaaacagaggctgagattaaagaagatgggaagctccacgtgactgtgaggaaatcaaacgcctcaagatcggacatcttctccagaagatctgtggggttgtcttctacaaccccacggccttccaatctgaccaatgccgagatttactctctgcaatcttctcgaaaccccactcccagaggatcaagttttaaccacacggatttctactccatgatggccgccggtgggaggaattccaatttcggctcatcggatgtttacgggctctccgcgtcgagagggccgactccgaggccgtcaaattatgaggaagatggtgggggaaagccgaggtttcactacaatgctgcggcgggaggcaatgcagggcactaccctgttccgaacccaggaatgttttcgccaacggggtcgaaaaatgcacaacccaatgctaagaagtctgccaatggcaatggggttgtggctcaaaaaacagaggaaggaaacagagatctccatatgtttgtttggagttcaagtgcttcccctgtttcagatgtttttgggggaaaccatgaatttgggggaaaccatgatcagaaggatgtgaggttggctgtctcccccggaaaagttgagggtcgtagagaaaaccaagaggagtatgcagagagggaagatttcagcttcggaaacagagagattctgaataataacaatggaggagcagagaaagttggagatattaaacccaaaaccatgccacccaccagtgtaatgacaaggctcattctgatcatggtttggagaaaactcatcagaaaccccaacacttattccagcctaattggcctcacttggtccttagtctcattcaggtggaatgttgaaatgccagccattgtcgcaaagtccatttctatactgtctgatgcaggcctcggcatggccatgttcagtcttggtttgttcatggctttgcaaccaaggatcatagcatgtgggaatacaatagcagctttttccatggctgtgagattccttacaggtccagctgtcatggctgttgcttccattgctgttggccttagaggagttctcttacgtgttgccattgtccaggcagctctcccacaaggaattgtcccctttgtctttgccaaagagtacaacgtacaccctgatattctcagcacaggagttatttttgggatgttgattgccttgcccattacgcttgtgtactacattttgctggggatctga

SEQ ID NO: 70 - protein, 607 aa, Momordica charantia
MISLLDFYHVMTAVVPLYVAMILAYGSVKWWKIFTPDQCSGINRFVALFAVPLLSFHFISTNNPYTMNLRFIAADTLQKLIVLAVLAVWSNISKRGCLEWTITLFSLSTLPNTLVMGIPLLKGMYGEFSGSLMVQIVVLQCIIWYTLMLFMFEYRGARMLISEQFPDTAGSIVSIHVDSDIMSLDGRQVLETEAEIKEDGKLHVTVRKSNASRSDIFSRRSVGLSSTTPRPSNLTNAEIYSLQSSRNPTPRGSSFNHTDFYSMMAAGGRNSNFGSSDVYGLSASRGPTPRPSNYEEDGGGKPRFHYNAAAGGNAGHYPVPNPGMFSPTGSKNAQPNAKKSANGNGVVAQKTEEGNRDLHMFVWSSSASPVSDVFGGNHEFGGNHDQKDVRLAVSPGKVEGRRENQEEYAEREDFSFGNREILNNNNGGAEKVGDIKPKTMPPTSVMTRLILIMVWRKLIRNPNTYSSLIGLTWSLVSFRWNVEMPAIVAKSISILSDAGLGMAMFSLGLFMALQPRIIACGNTIAAFSMAVRFLTGPAVMAVASIAVGLRGVLLRVAIVQAALPQGIVPFVFAKEYNVHPDILSTGVIFGMLIALPITLVYYILLGI

SEQ ID NO: 71 - DNA, 1824 bp, Momordica charantia
  CDS (1)..(1824)
atgattagccttttagatttctaccatgtaatgaccgcagtggttcctctttatgtggccatgatcttagcttatggctctgtgaaatggtggaaaatcttcactcccgaccaatgctctggaatcaaccgtttcgttgctctgtacgcggtccctcttctctcttttcacttcatctccaccaacaatccctataccatgaacctccgctttattgctgcagatactctccaaaaactcattggtctcgctgttcttgccgtttggagcaacataagcaaaagagggtgtttagagtggactattactctgttttccctttccactctgccaaatactctggttatggggattcctctgctgaaggggatgtatggggagttttctgggagtttgatggttcagattgttgtgctgcagtgcattatttggtacacattgatgctgttcatgtttgaatacagaggagccagaatgctgatttctgagcaatttccagacactgctggctccatagtctcaatccatgtcgattctgacattatgtcgctggatggaaggcaagttttggaaacagaggctgagattaaagaagatgggaagctccacgtgactgtgaggaaatcaaacgcctcaagatcggacatcttctccagaagatctgtggggttgtcttctacaaccccacggccttccaatctgaccaatgccgagatttactctctgcaatcttctccaaaccccactcccagaggatcaagttttaaccacacggatttctactccatgatggccgccggtgggaggaattccaatttcggctcatcggatgtttacgggctctccgcgtcgagagggccgactccgaggccgtcaaattatgaggaagatggtgggggaaagccgaggtttcactacaatgctgcggcgggaggcaatgcagggcactaccctgttccgaacccaggaatgttttcgccaacggggtcgaaaaatgcacaacccaatgctaagaagtctgccaatggcaatggggttgtggctcaaaaaacagaggaaggaaacagagatctccatatgtttgtttggagttcaagtgcttcccctgtttcagatgtttttgggggaaaccatgaatttgggggaaaccatgatcagaaggatgtgaggttggctgtctcccccggaaaagttgagggtcgtagagaaaaccaagaggagtatgcagagagggaagatttcagcttcggaaacagagagattctgaataataacaatggaggagcagagaaagttggagatattaaacccaaaaccatgccacccaccagtgtaatgacaaggctcattctgatcatggtttggagaaaactcatcagaaaccccaacacttattccagcctaattggcctcacttggtccttagtctcattcaggtggaatgttgaaatgccagccattgtcgcaaagtccatttctatactgtctgatgcaggcctcggcatggccatgttcagtcttggtttgttcatggctttgcaaccaaggatcatagcatgtgggaatacaatagcagctttttccatggctgtgagattccttacaggtccagctgtcatggctgttgcttccattgctgttggccttagaggagttctcttacgtgttgccattgtccaggcagctctcccacaaggaattgtcccctttgtctttgccaaagagtacaacgtacaccctgatattctcagcacaggagttatttttgggatgttgattgccttgcccattacgcttgtgtactacattttgctggggatctga

SEQ ID NO: 72 - protein, 607 aa, Momordica charantia
MISLLDFYHVMTAVVPLYVAMILAYGSVKWWKIFTPDQCSGINRFVALYAVPLLSFHFISTNNPYTMNLRFIAADTLQKLIGLAVLAVWSNISKRGCLEWTITLFSLSTLPNTLVMGIPLLKGMYGEFSGSLMVQIVVLQCIIWYTLMLFMFEYRGARMLISEQFPDTAGSIVSIHVDSDIMSLDGRQVLETEAEIKEDGKLHVTVRKSNASRSDIFSRRSVGLSSTTPRPSNLTNAEIYSLQSSPNPTPRGSSFNHTDFYSMMAAGGRNSNFGSSDVYGLSASRGPTPRPSNYEEDGGGKPRFHYNAAAGGNAGHYPVPNPGMFSPTGSKNAQPNAKKSANGNGVVAQKTEEGNRDLHMFVWSSSASPVSDVFGGNHEFGGNHDQKDVRLAVSPGKVEGRRENQEEYAEREDFSFGNREILNNNNGGAEKVGDIKPKTMPPTSVMTRLILIMVWRKLIRNPNTYSSLIGLTWSLVSFRWNVEMPAIVAKSISILSDAGLGMAMFSLGLFMALQPRIIACGNTIAAFSMAVRFLTGPAVMAVASIAVGLRGVLLRVAIVQAALPQGIVPFVFAKEYNVHPDILSTGVIFGMLIALPITLVYYILLGI

SEQ ID NO: 73 - DNA, 1854 bp, Pisum sativum
  CDS (1)..(1854)
atgattacattcaaagatctatacactgtcttaacagcagtcgttccattatatgttgctatgatcttagcctacggttctgtccgttggtggaagattttctcacccgatcaatgctccggcataaaccgtttcgtcgcggttttcgccgtccctctcctctctttccatttcatctcatccaacaatccataccaaatgaacttcagattcatagcggcagacacactgcaaaaaatcatcatgcttttcgcgctttcgctatggactaagttcactaaaaacggcaatttagaatggatgataaccattttctccttgtccacgcttccaaacactttggttatgggaattcctcttctaattgctatgtatggtgattattcaggaaccttaatggttcaagttgtggttcttcagtgtatcatttggtacactcttttgctctttctttttgagtaccgtggtgctaagcttttaatcatggaacagtttcctgaaaccgcggcttcgatcgtttcgtttaaagttgattcggacgttgtttcgctcgacggaagagattttcttgaaacggatgcttctgttggtgatgatgggaagttacatgttactgtgagaaaatctaacgcgtcgcggaggtcgtttatgatgactactccgcgaccgtcgaatttgactggagctgagatttatagtctcagctccacgccaagagggtctaatttcaaccacgccgagttttactccatgatgggttatcaacccagacattccaattttggtactactgatctctattctgttcagtcttctagaggacccactcctagaccttcgaatttcgaagaaaacggcgcaacttcgcctagattcgggttttatccggcgcagaccgtgcctgcttcgtatcctgcgccgaatcctgaattctcttctactgcgaaaactgtgaagaatcaaaatttgatgcagcagccacaacagcaacaggtttcattgcagacaaagggctctcaggatgctaaggaattgcacatgtttgtgtggagctcaagtcgttcgccggtgtcggaaagtgccggtctcaacgccttccgaaattcggaacaatcagaagagggtgctaaagagatcagaatggtggttgctgatgaacataatcaaaatggtgaaatcaataacaaaggggaagttggtggggaagaagatttcaagttcattggagtgaagggggaagaacaagttggagaagggctcaatgggtctaacaaactgagctccaatgcaacaccagagatccaccctaaagccaccggagtggccgattccggtgtcggaaaactcatgcctccggcgagtgtcatgactcgtctcatactcattatggtttggagaaaacttatccgaaatcccaacacttattcaagtcttattggtctcatttggtcccttgttgcatttaggtggggtgttcatatgcctaaaatagtagagaaatcaatttccatactctctgatgctgggcttggaatggctatgtttagcttaggtttatttatggctcttcaacctaagataattgcatgtggaaattcggttgcctcatttgccatggctattagatttgtcactggtccggcagttatggcagctgcttctatcgctgtcggcctccgtggtaccctccttcatgtagcaattgttcaggccgcacttccacaagggattgttccgtttgtgtttgcaaaagaatataatgttcatcctgccattcttagtactgcggttatatttgggatgttgatagctcttccaattactctactctactacattctccttggtttgtaa

SEQ ID NO: 74 - protein, 617 aa, Pisum sativum
MITFKDLYTVLTAVVPLYVAMILAYGSVRWWKIFSPDQCSGINRFVAVFAVPLLSFHFISSNNPYQMNFRFIAADTLQKIIMLFALSLWTKFTKNGNLEWMITIFSLSTLPNTLVMGIPLLIAMYGDYSGTLMVQVVVLQCIIWYTLLLFLFEYRGAKLLIMEQFPETAASIVSFKVDSDVVSLDGRDFLETDASVGDDGKLHVTVRKSNASRRSFMMTTPRPSNLTGAEIYSLSSTPRGSNFNHAEFYSMMGYQPRHSNFGTTDLYSVQSSRGPTPRPSNFEENGATSPRFGFYPAQTVPASYPAPNPEFSSTAKTVKNQNLMQQPQQQQVSLQTKGSQDAKELHMFVWSSSRSPVSESAGLNAFRNSEQSEEGAKEIRMVVADEHNQNGEINNKGEVGGEEDFKFIGVKGEEQVGEGLNGSNKLSSNATPEIHPKATGVADSGVGKLMPPASVMTRLILIMVWRKLIRNPNTYSSLIGLIWSLVAFRWGVHMPKIVEKSISILSDAGLGMAMFSLGLFMALQPKIIACGNSVASFAMAIRFVTGPAVMAAASIAVGLRGTLLHVAIVQAALPQGIVPFVFAKEYNVHPAILSTAVIFGMLIALPITLLYYILLGL

SEQ ID NO: 75 - DNA, 1860 bp, Populus tomentosa
  CDS (1)..(1860)
atgatttgctggaatgatctctacaacgttttgtccgctgtgattcctctatatgttgccatgatcttggcttatgggtctgttcggtggtggaaaattttcagcccggaccagtgttccggtatcaaccgtttcgtggcgatattcgcagtgccactactgtcattccattttatctccaccaatgatccctatgctatgaacttcaagttcattgcggccgacacgcttcaaaaaataataatgctgatcgctctgggaatttggactaatttcacaaaaaatggaagcttggaatggatgattaccatcttttctgtctcgactcttccgaacacccttgtcatgggcattcctcttttaaccgccatgtacggcacctactcgggaagcctgatggttcaaattgtggtgttgcagtgtatcatttggtacaccctcctcttgtttcttttcgagtatagaggtgccaagatgttgatcatggagcaatttcctgaaactgcagcctccattgtttcgtttaaggttgattctgacgtggtctctttagatggccgagattttctggaaactgatgccgaaatcggtgatgatggcaagttacatgtgacggtcaggaaatctaatgcctccaggcggtctcttgggccgggttctttctctggaatgactcctcgaccatcaaatcttaccggagctgagatttatagcctgagttcttcaaggaatcctactccaagagggtctaatttcaacccttcagatttctactccatgatgggagttcagggattccctggaaggcattcaaatctcggtccggctgacttgtactcagtacaatcttcgagagggccaactccaaggccgtctaatttcgaagaaaattgtgctccaacggctactttatcctctcctaggttcgggttttatccagcacagacagtacccacgtcttatccggcaccaaaccctgaatttgcctctactgtcactactaaaacagcaaaaaatcagcagcagcaaaatagcaaggcaaaccatgatgccaaggagctgcacatgttcgtgtggagctcgagtgcatcaccagtttctgaaggaggtgggctccacgtattcggtgggactgattttggtgcatcagagcaatctggacgatctgatcagggcgccaaggagatcaggatgttggttgctgaccatccgcgaaacggggaaaccaaaactattccacaacaagatggagattttgctggcgaggacttcagttttgcgggcagaggagaaggagatgacgtcgaccaaagggaaaaagaggggcccactggacttaacaaactagggtccagctcaacagccgagttgcaaccaaaagcagccgaagctccagattccggtggcagtaggaagatgcctccggcaagcgttatgacccgtttgatattgatcatggtttggcgcaaacttattcgaaaccccaacacatactccagtctcattggtctcacttggtctctagttgctttccggtggcatgtggaaatgcctaaaataataaaacagtcaatctccatactgtctgatgctgggctcggaatggctatgttcagcttaggtctttttatggctttgcaaccgaagctgattgcttgtgggaattcggttgccacattcgccatggctgttcgattcttgactggccctgcggtgatggccgctgcttcaattgccgtcggcctccgcggtaccctccttcatgttgctattgttcaggccgcactgccgcaaggaattgttccatttgtgtttgccaaggagtacaatgtccatccagccattcttagcaccgcgtaa

SEQ ID NO: 76 - protein, 619 aa, Populus tomentosa
MICWNDLYNVLSAVIPLYVAMILAYGSVRWWKIFSPDQCSGINRFVAIFAVPLLSFHFISTNDPYAMNFKFIAADTLQKIIMLIALGIWTNFTKNGSLEWMITIFSVSTLPNTLVMGIPLLTAMYGTYSGSLMVQIVVLQCIIWYTLLLFLFEYRGAKMLIMEQFPETAASIVSFKVDSDVVSLDGRDFLETDAEIGDDGKLHVTVRKSNASRRSLGPGSFSGMTPRPSNLTGAEIYSLSSSRNPTPRGSNFNPSDFYSMMGVQGFPGRHSNLGPADLYSVQSSRGPTPRPSNFEENCAPTATLSSPRFGFYPAQTVPTSYPAPNPEFASTVTTKTAKNQQQQNSKANHDAKELHMFVWSSSASPVSEGGGLHVFGGTDFGASEQSGRSDQGAKEIRMLVADHPRNGETKTIPQQDGDFAGEDFSFAGRGEGDDVDQREKEGPTGLNKLGSSSTAELQPKAAEAPDSGGSRKMPPASVMTRLILIMVWRKLIRNPNTYSSLIGLTWSLVAFRWHVEMPKIIKQSISILSDAGLGMAMFSLGLFMALQPKLIACGNSVATFAMAVRFLTGPAVMAAASIAVGLRGTLLHVAIVQAALPQGIVPFVFAKEYNVHPAILSTA

SEQ ID NO: 77 - DNA, 1800 bp, Pisum sativum
  CDS (1)..(1800)
atgataactctaatagatttctaccatgtcatgacagcaatggtgccactttatgttgctatgatcttagcttatggatcagtgaaatggtggaagatattctcacctgatcaatgttcaggaatcaaccgttttgtagcacttttcgctgttccacttctctcattccatttcatagcctcaaacaatccttacaaaatgaacctaagattcttagctgcagacacacttcaaaaaatcatgatcctaacccttctcttcatttggagcaatttctccaaaaggggttctctagaatggacaataacactcttttcactctcaactttgccaaacactttggtcatgggaatccctttactcaaaggaatgtacggcgatttctcaggtagtttaatggtgcaaatcgttgttcttcaatgtattatctggtatactatgatgcttttcatgtttgagtttagaggagcaaggttgttgatttctgaacagtttcccgacactgctggttccattgtttcaatccatgttgattctgatgtcatgtcgttagacggtagaacaccattggaaaccgatgctgaaatcaaacaagatggtaaacttcatgttactgttagaaaatcaaacgcttcaagatcagatatttactcaagaagatcacagggtctttcttccaacactcctaggccttctaatcttactaacgccgagatttactcgttgcaatcatcgcgaaatcctacgccaagagggtctagttttaatcatactgatttttattctatgatgggtggtggaagaaactctaactttaatgcttctgatgttaataactacggtttatcggcctcgcgaggtgttactccgaggccgtctaattacgaagaagatgcttcgaatgcgaagaagttgaaacattatccggctcctaatccgggaatgttttctcctactaataaaaatcttggttctaatgtcaatgttaagagaagtaatggtcagaaccaggatcagaatcagaatcaacagaaacaagatgatcttcatatgtttgtttggagttcaagtgcttcacctgtttctgatgtgtttggtggacatgaatttggttctcatgatcagaaagaagttaaattgaacgtgtctccaggaaaagtggacggtcatagagaaactcaagaggattatttggagaaagatgaattcagctttggaaatagaggaatggaaagggagatgaataatcaacaacatgaaggtgaaaaaattggagatggaaaatcaaaagttatgccaccagctagtgtcatgacccgccttattcttattatggtttggagaaaacttatcagaaacccaaacacttattcaagcttaataggtctagtttggtctctagtttcattcagatggaatattgaaatgcctgctataatagcaaaatctatatctatattgtcggacgcaggacttggcatggccatgttcagtctcggtttattcatggcattgcaaccaaaaatcatagcatgtggaaattccatagcagcttttgcaatggctgtgagattccttacaggtccagctgtgatggcagctgcttcatttgctgttggactcaaaggtgttctttttcatgttgcaattgtgcaggcagctcttccccaaggaattgtcccatttgtctttgctaaagaatataatgtacatcctgatattttaagcacaggtgtcatttttggaatgttgattgcattgcccattactcttgtgtactacattttaatgggactatga

SEQ ID NO: 78 - protein, 599 aa, Pisum sativum
MITLIDFYHVMTAMVPLYVAMILAYGSVKWWKIFSPDQCSGINRFVALFAVPLLSFHFIASNNPYKMNLRFLAADTLQKIMILTLLFIWSNFSKRGSLEWTITLFSLSTLPNTLVMGIPLLKGMYGDFSGSLMVQIVVLQCIIWYTMMLFMFEFRGARLLISEQFPDTAGSIVSIHVDSDVMSLDGRTPLETDAEIKQDGKLHVTVRKSNASRSDIYSRRSQGLSSNTPRPSNLTNAEIYSLQSSRNPTPRGSSFNHTDFYSMMGGGRNSNFNASDVNNYGLSASRGVTPRPSNYEEDASNAKKLKHYPAPNPGMFSPTNKNLGSNVNVKRSNGQNQDQNQNQQKQDDLHMFVWSSSASPVSDVFGGHEFGSHDQKEVKLNVSPGKVDGHRETQEDYLEKDEFSFGNRGMEREMNNQQHEGEKIGDGKSKVMPPASVMTRLILIMVWRKLIRNPNTYSSLIGLVWSLVSFRWNIEMPAIIAKSISILSDAGLGMAMFSLGLFMALQPKIIACGNSIAAFAMAVRFLTGPAVMAAASFAVGLKGVLFHVAIVQAALPQGIVPFVFAKEYNVHPDILSTGVIFGMLIALPITLVYYILMGL

SEQ ID NO: 79 - DNA, 1878 bp, Medicago truncatula
  CDS (1)..(1878)
atgattaccggtaaggatatatacgatgttttcgcagcaattgtgccgctatatgttgctatgatattagcatacggttcagttcgttggtggaaaatcttcacaccagatcaatgttctggtataaaccgttttgtcgctgttttcgcagttccattactatctttccattttatatcttccaatgatccttatgctatgaattaccatttcttagcagctgattcacttcaaaaagtagttatccttggtgctctttttatatggaacacattctcaaaaaaccaagatagtcttgattggactattacacttttctccctttcaactcttcctaacacacttgttatgggaatccctcttttaagagctatgtatggtgatttctcaggaaatcttatggtacaaattgttgttcttcaaagtgttatttggtacactcttatgttgtttttgtttgaatatagagctgctaaacttcttataacagaacagtttcctgaaactgcagcttctataacatcattcaaagttgattctgacgttgtttctcttaacggtagagaaccacttcaaactgatgcagagataggtgaagatggtaaacttcatgttgttgttaaaagatcaactactaactctatggtatctggttcatttaacaaatctcatttaaataatatgacgccacgagcttcaaatctaaccggtgttgagatatattctgttcaatcatcaagagaaccaacaccaagaggttctagttttaaccaaactgatttttatgccatgtttcaaagtaaagcaccgagtccaaaacacggttacacaaatagttttcaaagtaatggtaatggtgatatttattctatgcaatcttcaaaaggggctactccgaggacttcaaatttcgaagatgagacattgaggatgcataagaaaaggggagggaggagtatgagtggtgagttgttcaataatggtggttcttaccctcctccaaatcctatgctttctggttctacaagtgctggcacaaagaagaaagatagcatgggcggtggaagtggtaatggacctaataacaaggagttacacatgtttgtttggagttcaagtgcttcacctgtttctgaagggaatcttagacatgcagtaaatagagctgcttctactgattttggcactgttgatccttccaaatatgttccacatgaaaattccgttgcatcaaaagctgttactgaattgattgagaacatgagtcctagagaaagggatgttgaaattgaggaagcagtaaagtctccatatattagccagaagaagatggacttggaaggaggaggggatgtaagcaaaaatacacagatgccaccagcaagtgtcatgacaagactaatcctcatcatggtttggagaaaactcatcagaaatcctaatacctactcaagtcttataggacttgtttggtctcttgtatcatttaggtttcacattgaaatgccatccattgtaaaaggttccatctcaatactgtctgatgctggtcttggaatggccatgttcagtctaggtctgttcatggctttacagcctaagctgattgcatgtggaaaacgagttgcaacattttctatggctgtaaggttcttgaccggtccagctgtgattgcggcaacctcaatagcaattggtatccgtggagttctgttacatgttgcaattgttcaggctgcacttccccaaggtattgttccctttgtgtttgccaaagaatacaatctccatccaaatatactcagtactggggttatatttggaatgttgattgcattgcccataacaatactctactatgtgcttcttggagtatag

SEQ ID NO: 80 - protein, 625 aa, Medicago truncatula
MITGKDIYDVFAAIVPLYVAMILAYGSVRWWKIFTPDQCSGINRFVAVFAVPLLSFHFISSNDPYAMNYHFLAADSLQKVVILGALFIWNTFSKNQDSLDWTITLFSLSTLPNTLVMGIPLLRAMYGDFSGNLMVQIVVLQSVIWYTLMLFLFEYRAAKLLITEQFPETAASITSFKVDSDVVSLNGREPLQTDAEIGEDGKLHVVVKRSTTNSMVSGSFNKSHLNNMTPRASNLTGVEIYSVQSSREPTPRGSSFNQTDFYAMFQSKAPSPKHGYTNSFQSNGNGDIYSMQSSKGATPRTSNFEDETLRMHKKRGGRSMSGELFNNGGSYPPPNPMLSGSTSAGTKKKDSMGGGSGNGPNNKELHMFVWSSSASPVSEGNLRHAVNRAASTDFGTVDPSKYVPHENSVASKAVTELIENMSPRERDVEIEEAVKSPYISQKKMDLEGGGDVSKNTQMPPASVMTRLILIMVWRKLIRNPNTYSSLIGLVWSLVSFRFHIEMPSIVKGSISILSDAGLGMAMFSLGLFMALQPKLIACGKRVATFSMAVRFLTGPAVIAATSIAIGIRGVLLHVAIVQAALPQGIVPFVFAKEYNLHPNILSTGVIFGMLIALPITILYYVLLGV

SEQ ID NO: 81 - DNA, 1575 bp, Medicago truncatula
  CDS (1)..(1575)
atgataacgttaacagatttctaccatgtgatgacatcaatggtgccactttacgtggctatgatattagcttatggttcagtgaaatggtggaagatattctctcccgatcaatgctccggcatcaatcgcttcgttgctctgtttgcagttcctttactttcattccatttcattgcctctaacaatccttacaaaatgaacacacgcttcctcgtcgcagacacacttcaaaagattatcgtcttacttgctctcaccatttgggccaacgtcagcaaaaggggttgtttagaatggacaataacactcttctccatttcaacactcccaaacactttggttatgggaatccctcttctcaaatgtatgtacggtggtgaattttctgggagtttgatggtacaaattgtggtccttcagtgtattatttggtacacgttgattttgttcatgtttgagtttagaggagcaagaatgcttatctcagaacagtttccagacactgctggtaccattgtttccattcatgttgactctgatgtgatgtcgttggatgatggaagacagtgtttggaaacagaagctgtaatcaaagaagatgggaagcttcatgttatagtgaggagatcaaatgcttcaagaaggtctcattctcagtctcatacaacacctcgagcttcaaatctgacgaatgcagagatatactctttgcaatcatcaaggaatccaactccaagagggtctagtttcaaccacacagatttacattccatgatgggtggtagtcgtaattctaactttggtgcttttgatttgaaaggaacaccaccgaggacttgtaattatgataattcaatgtctacgacaaaggggaattaccctgcgccaaaccccgaaatgttctctccaaaaaacgttgttgctgctaagaaaacggaggatcttcatatgtttttttggagttcaagtgattcccttgtttctgatgttaaattgaatgtctctccagaaaaagtggagggtgaggatgagcacaagagaggggaggaaggtggggcaaaaacgatgccaccagcaagtataatgacgaggctgatattgataatggtttggagaaaacttatcagaaacccaaacacatattcgagcattatcggcctaacttggtcactcatttcattcaggtggaatattgaaatgcctgttatcatagcaaagtctatttccatattgtcggatgcagggcttggcatggccatgttcagtcttggtctgttcatggctttgcaaccgaggattatagcatgtggtaatcgcatagcagctttctctatggccattagattccttaccggtccagctgtcatggcagctgcttccattgttgttggactcagaggaaccctcttgaacgttgccattgttcaggcagcacttccacaaggaattgtcccatttgtcttcgccaaggaatacaatgtacatcctgatattctcagtacaggggtaatttttgggatgttgattgcattgcccataacgctcgtttattacatcttgttgggtctatga

SEQ ID NO: 82 - protein, 524 aa, Medicago truncatula
MITLTDFYHVMTSMVPLYVAMILAYGSVKWWKIFSPDQCSGINRFVALFAVPLLSFHFIASNNPYKMNTRFLVADTLQKIIVLLALTIWANVSKRGCLEWTITLFSISTLPNTLVMGIPLLKCMYGGEFSGSLMVQIVVLQCIIWYTLILFMFEFRGARMLISEQFPDTAGTIVSIHVDSDVMSLDDGRQCLETEAVIKEDGKLHVIVRRSNASRRSHSQSHTTPRASNLTNAEIYSLQSSRNPTPRGSSFNHTDLHSMMGGSRNSNFGAFDLKGTPPRTCNYDNSMSTTKGNYPAPNPEMFSPKNVVAAKKTEDLHMFFWSSSDSLVSDVKLNVSPEKVEGEDEHKRGEEGGAKTMPPASIMTRLILIMVWRKLIRNPNTYSSIIGLTWSLISFRWNIEMPVIIAKSISILSDAGLGMAMFSLGLFMALQPRIIACGNRIAAFSMAIRFLTGPAVMAAASIVVGLRGTLLNVAIVQAALPQGIVPFVFAKEYNVHPDILSTGVIFGMLIALPITLVYYILLGL

SEQ ID NO: 83 - DNA, 1815 bp, Medicago truncatula
  CDS (1)..(1815)
atgatcactttaacagatttctaccatgtcatgacagcaatggtgccactttatgtagctatgatcttagcttatggatcagtaaaatggtggaaaatattttcacctgatcaatgttcaggaatcaaccgttttgttgcactctttgcagttccacttctttcattccatttcatagcatcaaacaatccttacaaaatgaaccttaggtttttagcagctgatacacttcaaaaactcataatcttatgtcttcttgctatttggagcaatttctccaaaaggggttgtttagaatggactataacactcttttcactctcaacacttccaaacactttggttatgggaattcctttacttaaaggaatgtatggtgaattttcaggtagtttaatggtacaaattgttgttcttcaatgtatcatttggtatactttgatgcttttcatgtttgagtttagaggagcaaggttgttgatttctgaacagtttcctgacactgctggttccattgtttcaatccatgttgattctgatgtcatgtcattggatggtagaacaccattggaaactgatgctgaaatcaaagaagatggtaaacttcatatcactgttagaaaatcaaatgcttcaagatcagatatttactcaagaagatcacaaggtctttcttcaaatactccaagaccttctaatcttactaacgctgaaatttactctttgcaatcttctagaaaccctacaccaagaggttctagttttaatcatactgatttttattctatgatgggtggtggaaatggaagaaactcaaactttggtgctaatgatgttgttaataactatggtttatctgctaattcaagaggtgttactccaagaccttctaattatgaagaagaagctaataataatgctaagaaattcaaaaactatcctgcacctaatccaggaatgttttctcctactaataataataatggtagcaaaaatcttggttctaatgttagtgttaatgctaagaagagtaatggtcaaagtcaacagaaacaagaagatcttcatatgtttgtttggagttctagtgcttcacctgtctctgatgtgtttggtggacatgactttggtgctcatgatcagaaagaagttaaattgaatgtgtctcctggaaaagtggagggtcatagagaaactcaagaggactatttggagaaagatgaattcagctttggtaataaagggatggaaagggaaatgaatcaacatgaaggaggtgagaaaggtggagatggaaaatcaaaagttatgccaccagctagtgtgatgacaaggcttatattgattatggtttggagaaaacttatcagaaatccaaacacttattctagcttaattggtctcacttggtctttggtttcattcaggtatcatattgaaatgcctgccattatagcaaagtctatttccattctgtcagatgcaggacttggcatggctatgttcagtcttggtttgttcatggctttgcaaccaaaaatcatagcatgtggaaattccattgcagctttttcaatgggtgtgagattccttgttggtccagctgtcatggcagctgcttcatttgctgttggactcaaaggtgttctctttcatgttgccattgttcaggcagctcttccacaaggaattgtcccatttgtctttgctaaagaatataatgtacatcctgatattctaagcacaggtgtcatttttggaatgttgattgcattacccattactcttgtgtactacattttaatggggctatga

SEQ ID NO: 84 - protein, 604 aa, Medicago truncatula
MITLTDFYHVMTAMVPLYVAMILAYGSVKWWKIFSPDQCSGINRFVALFAVPLLSFHFIASNNPYKMNLRFLAADTLQKLIILCLLAIWSNFSKRGCLEWTITLFSLSTLPNTLVMGIPLLKGMYGEFSGSLMVQIVVLQCIIWYTLMLFMFEFRGARLLISEQFPDTAGSIVSIHVDSDVMSLDGRTPLETDAEIKEDGKLHITVRKSNASRSDIYSRRSQGLSSNTPRPSNLTNAEIYSLQSSRNPTPRGSSFNHTDFYSMMGGGNGRNSNFGANDVVNNYGLSANSRGVTPRPSNYEEEANNNAKKFKNYPAPNPGMFSPTNNNNGSKNLGSNVSVNAKKSNGQSQQKQEDLHMFVWSSSASPVSDVFGGHDFGAHDQKEVKLNVSPGKVEGHRETQEDYLEKDEFSFGNKGMEREMNQHEGGEKGGDGKSKVMPPASVMTRLILIMVWRKLIRNPNTYSSLIGLTWSLVSFRYHIEMPAIIAKSISILSDAGLGMAMFSLGLFMALQPKIIACGNSIAAFSMGVRFLVGPAVMAAASFAVGLKGVLFHVAIVQAALPQGIVPFVFAKEYNVHPDILSTGVIFGMLIALPITLVYYILMGL

SEQ ID NO: 85 - DNA, 1866 bp, Medicago truncatula
  CDS (1)..(1866)
atgataacactaaaagatctttacactgtcttaacagcagtggttccattatatgttgctatgatcttagcctacggttcggtccgttggtggaagattttctcaccggatcaatgttccggtataaaccgttttgtcgcggttttcgccgtacctctcctttccttccacttcatctcaaccaataatccataccaaatgaacttcaggttcatagctgcagacacacttcaaaaaatcatcatgctagtagcactttcattatggacattgttcactaaaaatggcaatttagaatggatgataacaatcttttcattatcaacacttcctaacactttggttatgggaattcctttgttaattgctatgtatggtgattattcaggtagcttaatggttcaagttgtggttcttcagtgtattatttggtacactcttttgctttttctttttgagtaccgtggtgctaagcttttaatcatggagcagtttccagaaaccgcggcttccatcgtttcctttaaggtcgattcggacgttatgtcgttagatggaagagattttcttgaaactgatgcatcagttggtgatgatgggaagttacatgttactgttaggaagtctaacgcgtcgcggaggtcatttatgatgaatactccgcgaccgtcaaatttgactggagctgagatttatagtctcagctccacacctagaggatccaatttcaaccatcaggagttttactccatgatgggttatcaaccaagacattccaattttggggctaatgatttgtattctgttcagtcttcttctagaggaccaactcctagaccttcaaatttcgaagaaaacggtgcaagttctcctagattcgggttttatccggctgcgcaaaccgtgcctacttcgtatccggtgccgaacccggaattctcctctactactaaacctgtgaagaatcagaatcaaaatttgatgccgcaacaaccgcaggttcaattgcagacaaaaggttctcaggataaagagttgcatatgtttgtgtggagctcaagtgcttcgccggtttcggaaagtgctggcctcaacgtgttccgaaattcggaacaatcggaagagggtgctaaggagatcaggatggtggtggctgatgaacataatcaaaatggtgaaaccaataacaaaggtggtcaagaaaaggaaataggtggggaagaggacttcaagttcaatggggtgaaggtaggagaacaaggagaaggacccaatgggcctaacaagctcgggtcgaattcaacgccggagctccaccctaaagccactggagtcgcggattcaagtgtcggaaaactcatgcctccggcgagcgtcatgacacgtctcatactcattatggtttggaggaagcttatccgtaatccaaacacttattcaagtctcattggtcttatttggtcccttgttgcctttaggtgggatgttcatatgcctaaaataatagagaaatcaatttccatactgtctgatgctggtcttggaatggctatgtttagcttaggtctgtttatggctcttcaacccaagatcattgcatgtgggaattctgttgcttcatttgccatggctataagattccttactggtccagcagttatggcagcagcttctatcgccgttggcctccgtgggaccctcctacatgtagctattgttcaggctgcacttccacaagggattgttccatttgtgtttgcaaaagagtacaatgttcatccagccattcttagtacagcggttatatttggtatgttaatagcccttccaattactctactctactacattctccttggtttgtaa

SEQ ID NO: 86 - protein, 621 aa, Medicago truncatula
MITLKDLYTVLTAVVPLYVAMILAYGSVRWWKIFSPDQCSGINRFVAVFAVPLLSFHFISTNNPYQMNFRFIAADTLQKIIMLVALSLWTLFTKNGNLEWMITIFSLSTLPNTLVMGIPLLIAMYGDYSGSLMVQVVVLQCIIWYTLLLFLFEYRGAKLLIMEQFPETAASIVSFKVDSDVMSLDGRDFLETDASVGDDGKLHVTVRKSNASRRSFMMNTPRPSNLTGAEIYSLSSTPRGSNFNHQEFYSMMGYQPRHSNFGANDLYSVQSSSRGPTPRPSNFEENGASSPRFGFYPAAQTVPTSYPVPNPEFSSTTKPVKNQNQNLMPQQPQVQLQTKGSQDKELHMFVWSSSASPVSESAGLNVFRNSEQSEEGAKEIRMVVADEHNQNGETNNKGGQEKEIGGEEDFKFNGVKVGEQGEGPNGPNKLGSNSTPELHPKATGVADSSVGKLMPPASVMTRLILIMVWRKLIRNPNTYSSLIGLIWSLVAFRWDVHMPKIIEKSISILSDAGLGMAMFSLGLFMALQPKIIACGNSVASFAMAIRFLTGPAVMAAASIAVGLRGTLLHVAIVQAALPQGIVPFVFAKEYNVHPAILSTAVIFGMLIALPITLLYYILLGL

SEQ ID NO: 87 - DNA, 1980 bp, Medicago truncatula
  CDS (1)..(1980)
atgataacctggcacgatctatacacagttttaaccgcagtagttccactttacgtagccatgatcttagcctatggctccgtacggtggtggaaaatattctcaccggaccaatgttccggcataaaccgtttcgtcgcgattttcgcagttcctcttctatcctttcatttcatctccacaaataacccttatgccatgaactataggttcatcgcagctgatacacttcaaaaaatcatcatgctccttgcacttacaatttggactaatttcacagctaatggtagcttagagtggatgatcacaatcttctctctttcaacattacccaacactttggttatgggaattccacttctcatagctatgtatggtgaatattccggtacccttatggttcaagttgtggttcttcagtgtatcatttggtacactttgttattgtttctttttgagtatcgtggtgctaagcttctaattatggaacagtttcctgaaactgctgcttctattatttcctttaaggttgattctgatgttgtttctcttgatgggagagattttcttgagacagatgctgaggttggtgatgatggtaagcttcatgttcatgtcagaaaatcaaacgcttcccggagatcttttatgatgactccacggccgtcgaatctcaccggagcagagatttatagtttgagttcttcccggaatccgacgccgcgagggtctaattttaatcatacggatttctactctatgatgggctatgctccgagacattctaattttggtgctaatgatgtgtattccgttcagtccaattcccgtgggccgactccaagaccgtcaaacttcgaagagaaccctgtgccaactgcaacatcggcacagactgttaactctccgaaatttggattttatccggcacaaaatgtgccggcagcttaccctgctccaaacccggaattctcttccgggttgagcaagagtgttagtaaaaactctcagcaacatttatcacagcaacagactcagcaaacagttcaagtacaaccacaaacagttactagcaatggctctgctgctgctgctaaaactagccatgatgctaaagagcttcacatgtttgtgtggagctctagtgcctcaccggtttccgaagccagcgggcttcaagtttttggtagtggtgctgctgattacggagcgtctgatcaatctggacgctccgaacaaggtgctaaagagattagaatgttggtttctgatgaccatccaccaaatggtgttaatattaccaacaaaggtatgcaagaaacagagcttggtggggaagagttgaagtttccagtaaaagaagaagaattgctggtagaagaagaggtagggaaagtggaaccagctgccctgaacaagctaggaggatccagctcaacggcggagctacacccaacagccaccgtgaaacacatgcctccggcaagtgttatgacccgtctcattctgatcatggtttggcggaagcttatccgtaacccaaacacgtactccagcctcattggtctaatttggtctcttgtggcatttaggtggcatgtgcatatgcctaaaataatagagaaatcaatctccatactgtctgatgctggtcttggaatggctatgttcagtttaggtttgtttatggctctacaacccaagatgattgcatgtggaaactcagttgcttcatttgcaatggctgttcgatttcttacaggtcctgcagtcatggctgcagcttccattgctgttggactgcgtggtaaccttttacgtgtagctattgttcaggctgcacttcctcaagggattgttccatttgtgtttgccaaggagtacaatgttcatccagccattcttagtacaggggttatttttggaatgttgatagctctaccaattactctagtctactacatattacttggtttgtaa

SEQ ID NO: 88 - protein, 659 aa, Medicago truncatula
MITWHDLYTVLTAVVPLYVAMILAYGSVRWWKIFSPDQCSGINRFVAIFAVPLLSFHFISTNNPYAMNYRFIAADTLQKIIMLLALTIWTNFTANGSLEWMITIFSLSTLPNTLVMGIPLLIAMYGEYSGTLMVQVVVLQCIIWYTLLLFLFEYRGAKLLIMEQFPETAASIISFKVDSDVVSLDGRDFLETDAEVGDDGKLHVHVRKSNASRRSFMMTPRPSNLTGAEIYSLSSSRNPTPRGSNFNHTDFYSMMGYAPRHSNFGANDVYSVQSNSRGPTPRPSNFEENPVPTATSAQTVNSPKFGFYPAQNVPAAYPAPNPEFSSGLSKSVSKNSQQHLSQQQTQQTVQVQPQTVTSNGSAAAAKTSHDAKELHMFVWSSSASPVSEASGLQVFGSGAADYGASDQSGRSEQGAKEIRMLVSDDHPPNGVNITNKGMQETELGGEELKFPVKEEELLVEEEVGKVEPAALNKLGGSSSTAELHPTATVKHMPPASVMTRLILIMVWRKLIRNPNTYSSLIGLIWSLVAFRWHVHMPKIIEKSISILSDAGLGMAMFSLGLFMALQPKMIACGNSVASFAMAVRFLTGPAVMAAASIAVGLRGNLLRVAIVQAALPQGIVPFVFAKEYNVHPAILSTGVIFGMLIALPITLVYYILLGL

SEQ ID NO: 89 - DNA, 1854 bp, Cucumis sativus
  CDS (1)..(1854)
atgattaccctttcagatttctaccatgtaatgactgcagtggttcctctttatgtagctatgattttagcttatgggtctgtgaaatggtggaagatcttcactcctgatcaatgttctggaatcaatcgttttgttgctttgtttgctgttcctcttctctcttttcatttcatttccacaaacaatccctacactatgaacttacgctttattgctgcagacactctccaaaaactcattgttcttgctgttcttgctgtttggagtaacataagtaaaaggggttgtttggaatggacgattactctattttctctttccactcttcccaatactttggttatggggattcctttgcttaaagggatgtatggggatttttcagggagcttgatggttcagattgttgtacttcaatgtattatttggtacacattgatgctgttcatgtttgaatatagaggagccagaatgctgatttctgaacagtttccagatactgctggttctatagtctcaatccatgtcgattctgacattatgtcgttagatggaaggcaagttttggaaacagaagctgagattaaagaagatgggaagcttcacgtgactgtgaggaaatcaaatgcttcaagatcagatatcttctcaagaagatcagttgggttgtcttctacaactccacgcccttcaaacttaaccaatgcggagatttactctttgcaatcatctcgaaatcccactcctagaggctcaagtttcaaccacactgatttttactctatgatggctgctggtggaagaaactccaactttggctcttctgatgtttatggcctttcggcttcgagaggtccgacgcctaggccgtctaattacgaggaggaaggcggcggtaacggtggaaagccgaggtttcattacaatgctacaacagggggcaatgcaaatgcaaatgcaaatgctaatgtaaatcattaccctgctccaaacccaggaatgttttcacctacagggtctaaaaatgcacaacccaacaatgctaagaagccagccaatgggaaaacagaggatggaagcagagatttacacatgtttgtttggagttcaagtgcttcccctgtttctgatgtttttgggaaccatgaatttggagctcataatgatcaaaaggatgtaagattagctgtctctcctggaaaagaaggacgtagagagaaccaggaggaatatgcagagagagaagatttcagcttcggaaatagagaaatgatgaacagtaacaacaatggaggagtaggagtaggaggaacggagaaagttggtgatattaaacccaaaaccatgccacccactagtgttatgacaaggctaatcttgatcatggtttggagaaagctcataagaaaccccaacacttactctagtttaattggtctcacttggtccttagtttcattcaggtggaatgttgaaatgccagccattattgcaaaatccatttctatactatctgatgcagggcttggaatggccatgtttagtcttggtttgttcatggcattgcaaccaaggatcatagcatgtggaaatagcatagcagctttttcaatggctgtgagattccttacaggtccagctgtaatggctgttgcttccattgctgttggccttagaggagttctcctacgtgttgccattgtccaggcagctctcccacaaggaattgtcccctttgtctttgccaaggagtacaatgtacatcctgatattctcagcacaggagttatctttgggatgttggttgcattgccaatcacccttgtttattacattttgctggggatttga

SEQ ID NO: 90 - protein, 617 aa, Cucumis sativus
MITLSDFYHVMTAVVPLYVAMILAYGSVKWWKIFTPDQCSGINRFVALFAVPLLSFHFISTNNPYTMNLRFIAADTLQKLIVLAVLAVWSNISKRGCLEWTITLFSLSTLPNTLVMGIPLLKGMYGDFSGSLMVQIVVLQCIIWYTLMLFMFEYRGARMLISEQFPDTAGSIVSIHVDSDIMSLDGRQVLETEAEIKEDGKLHVTVRKSNASRSDIFSRRSVGLSSTTPRPSNLTNAEIYSLQSSRNPTPRGSSFNHTDFYSMMAAGGRNSNFGSSDVYGLSASRGPTPRPSNYEEEGGGNGGKPRFHYNATTGGNANANANANVNHYPAPNPGMFSPTGSKNAQPNNAKKPANGKTEDGSRDLHMFVWSSSASPVSDVFGNHEFGAHNDQKDVRLAVSPGKEGRRENQEEYAEREDFSFGNREMMNSNNNGGVGVGGTEKVGDIKPKTMPPTSVMTRLILIMVWRKLIRNPNTYSSLIGLTWSLVSFRWNVEMPAIIAKSISILSDAGLGMAMFSLGLFMALQPRIIACGNSIAAFSMAVRFLTGPAVMAVASIAVGLRGVLLRVAIVQAALPQGIVPFVFAKEYNVHPDILSTGVIFGMLVALPITLVYYILLGI

SEQ ID NO: 91 - DNA, 1731 bp, Gossypium hirsutum
  CDS (1)..(1731)
atgatcactttaactgacttctaccatgtaatgactgcaatggtgccactttacgtggccatgattttagcttacggctcagtgaaatggcggaagatcttctctcctggtcagtgttcggggattaatcgctttgttgctctctttgccgtccctctcctctctttccacttcatcgcctctaacgacccttacgctatgaactttcgtttcatagcagctgataccctccaaaaagttatggttcttggaatactggcagtttggtccaaggtgagcaaaaggggttgcttggaatggaccatcaccctattttcactctctactcttcccaacactttggtgatgggcacccctttgctgaaaggaatgtacggggagttttcaggaagcttaatggtgcagatagttgtccttcaatgcattatttggtacactttgatgcttttcatgtttgaatataaaggtgccaaaatgctgatatctgagcaattccccgacactgctggctctattgtttcaatccatgtagactcagatatcatgtcactcgatggtcggcaacctttagaaactgaagctgagatcaaagaagatggtaagctccatgttactgtcaggaaatccaatgcctcaagatcagatattttctcaagaaggtcccagggtttatcttcaacaactccacgcccttccaatctgaccaatgctgagatctactcgttgcaatcatcaagaaacccaacaccaagaggctcaagctttaatcacactgatttctactctatgatggctgggggacgcaactccaatttcggtgctgcagatgtttacggtttgtctgcctctcgaggaccaactcccagaccatccaattatgaggacgatggtacaggcatgggtaaaccaaggttccattaccacgcacaaggtggcgcaggtgcagcccattatccggctcctaatccgggtatgttctctcccaatgggtctaaagctaatacaaagaagcctaacgatcaggctccgcaaaaggctgaagatggtggcagggatcttcatatgtttgtttggagttcaagtgcttctcctgtatccgacgtctttggtggtggtggtggccatgaatatggagcaaacgagcagaaagaggttagagtggctgtctccccagggaaagcggaaggacatagaaggaataacgaggagtacatggagagagaggatttcagctttgggaaccgaggattggaacgagaaatgaccaacaaccacgaaggtgacaaagtgggggatggcaagcccaaaactatgcctcctgcaagtgtcatcacaaggctgatcatcatcatggtttggagaaagcttatcagaaatcccaacacttattcaagcttaagaggactcacttggtctctaatctcattcggtctgttcatggcattgcaaccgaggatcatagcatgtggaaattccgttgcagcttttgccatgggtgtgagattccttgcaggtccagctgtgatggcagccgcttccatagctgtcggactccgtggcgttctcttacacgttgccattgtgcaggcagctctcccacaaggcattgtcccctttgtctttgccaaggaatacaacctacaccctgatattctcagcactgctgttatttttggaatgctaatagccttgcccataacgcttgtctactacatagtattgggattatga

SEQ ID NO: 92 - protein, 576 aa, Gossypium hirsutum
MITLTDFYHVMTAMVPLYVAMILAYGSVKWRKIFSPGQCSGINRFVALFAVPLLSFHFIASNDPYAMNFRFIAADTLQKVMVLGILAVWSKVSKRGCLEWTITLFSLSTLPNTLVMGTPLLKGMYGEFSGSLMVQIVVLQCIIWYTLMLFMFEYKGAKMLISEQFPDTAGSIVSIHVDSDIMSLDGRQPLETEAEIKEDGKLHVTVRKSNASRSDIFSRRSQGLSSTTPRPSNLTNAEIYSLQSSRNPTPRGSSFNHTDFYSMMAGGRNSNFGAADVYGLSASRGPTPRPSNYEDDGTGMGKPRFHYHAQGGAGAAHYPAPNPGMFSPNGSKANTKKPNDQAPQKAEDGGRDLHMFVWSSSASPVSDVFGGGGGHEYGANEQKEVRVAVSPGKAEGHRRNNEEYMEREDFSFGNRGLEREMTNNHEGDKVGDGKPKTMPPASVITRLIIIMVWRKLIRNPNTYSSLRGLTWSLISFGLFMALQPRIIACGNSVAAFAMGVRFLAGPAVMAAASIAVGLRGVLLHVAIVQAALPQGIVPFVFAKEYNLHPDILSTAVIFGMLIALPITLVYYIVLGL

SEQ ID NO: 93 - DNA, 1767 bp, Populus tremula x Populus tremuloides
  CDS (1)..(1767)
atgatcagtatcgtagacctctaccatgtccttacagctgtggtacccctctatgtggccatgattttggcttatggttctgtcaaatggtggaaaatctttagccctgatcaatgttcagggatcaacagatttgttgctctgtttgcagtacctttgctttcttttcacttcatttcctccaacaacccctatgctatgaacttagggttcattgctgcagatactcttcaaaaaattattgtcttggtggttttagctatttggtccagagctagctccagaggctcccttgaatggtccattactttgttttcactctctagtctcccaaacactcttgttatgggcatccctttgttgaagggaatgtatggaaattcctcagggagtctcatggtccaaatagttgttcttcaatgcataatatggtacacattgatgctgttcttgtttgagtatagaggagctagaatcttgattggtgaacagtttcctgacacagctggctctataatatccttcagggttgattctgatattctttctttagatggtagagagccattgcaaaccgaggctgaagtcggtgaagatgggaagttacatgttactgttcggaaatcaactagttcaagatcagaagttttttctcacatgtcccatggtctaaattctggtctttcattgactcctagaccatctaatttgaccaatgcagagatatactctctacaatcctcaaggaatcctaccccaagagcttcgagttttaaccataccgatttttactccatggttaatggcaagaatgcgagtccaagacactctaacttcactaacttgcaattcgacgaagaaagtggaggacttggggtatttggtaatgttccaagagcaaatggaagtgcttatcctgctccaccaaatgctggaatcttttctcctgggggtaaaaagaaggcaaatggggctgagaatggcaaggatttgcatatgtttgtttggagttcaagtgcttcaccagtatctgaaggtggcctacatgtctttaagggaggggattatggcaatgacctcggtggggtagctcaccataaagattatgatgagtttggtcgagatgagttcagctttggaaatagacctggacctaatggagtggatcgggatggtccagtgctttctaagcttggttcaagctctacagccgagctacacccaaagagtgctgctaatggtgaagccaagccaactgtcatgcctcctacaagcgttatgacaagactcattctcattatggtgtggagaaaacttataagaaatccaaatacctattccagcctgattggcctcacctggtctcttgtttcattcaagtggaacataatgatgcccgcgatcattgctaattcaatagctattctatctaatgctggtcttgggatggccatgtttagtcttggtttgttcatggcattacagcctaggattatcgcctgtggaaactcaatcgcttcctttgccatgggtgttagattcctcacaggtcctgcagtcatggctgctgcttcgtttgctgttggtctacgaggagatctgctgcgcattgccatagtgcaggcagctcttccacaagggattgtgccctttgtctttgcaaaagaatataatgttcatcctgacatactgagcactggagttatatttgggatgctaattgctctacccatcacactggtctactacattttgctgggactttga

SEQ ID NO: 94 - protein, 588 aa, Populus tremula x Populus tremuloides
MISIVDLYHVLTAVVPLYVAMILAYGSVKWWKIFSPDQCSGINRFVALFAVPLLSFHFISSNNPYAMNLGFIAADTLQKIIVLVVLAIWSRASSRGSLEWSITLFSLSSLPNTLVMGIPLLKGMYGNSSGSLMVQIVVLQCIIWYTLMLFLFEYRGARILIGEQFPDTAGSIISFRVDSDILSLDGREPLQTEAEVGEDGKLHVTVRKSTSSRSEVFSHMSHGLNSGLSLTPRPSNLTNAEIYSLQSSRNPTPRASSFNHTDFYSMVNGKNASPRHSNFTNLQFDEESGGLGVFGNVPRANGSAYPAPPNAGIFSPGGKKKANGAENGKDLHMFVWSSSASPVSEGGLHVFKGGDYGNDLGGVAHHKDYDEFGRDEFSFGNRPGPNGVDRDGPVLSKLGSSSTAELHPKSAANGEAKPTVMPPTSVMTRLILIMVWRKLIRNPNTYSSLIGLTWSLVSFKWNIMMPAIIANSIAILSNAGLGMAMFSLGLFMALQPRIIACGNSIASFAMGVRFLTGPAVMAAASFAVGLRGDLLRIAIVQAALPQGIVPFVFAKEYNVHPDILSTGVIFGMLIALPITLVYYILLGL

SEQ ID NO: 95 - DNA, 1923 bp, Populus tremula x Populus tremuloides
  CDS (1)..(1923)
atgattagctggaatgatctctacaacgttttgtccgctgtgattcctctatatgttgccatgatcttggcttatgggtctgttcggtggtggaaaattttcagcccggaccagtgttccggtatcaaccgtttcgtggcgatattcgcagtgccactactgtcattccattttatctccaccaacgatccctatgctatgaacttcaggttcattgcggccgacacgcttcaaaaaataataatgctgatcgctctgggaatttggactaatttcacaaaaaatggaagcttggaatggatgattaccatcttttctgtctcgactcttccgaacacccttgtgatgggcattcctcttttaaccgccatgtacggcacctactcgggaagcctgatggttcaaattgtggtgttgcagtgtatcatttggtacactctcctcttgtttcttttcgagtacagaggtgccaagatgttgatcatggagcaatttcctgaaactgcagcctccattgtttcgtttaaggttgattctgacgtggtctctttagatggccgagattttctggaaactgatgctgaaatcggcgatgatggcaagttacatgtgacggtcaggaaatctaatgcctccaggcggtctcttgggccgggttctttctctggaatgactccccggccatcaaatcttaccggagctgagatttatagcctgagttcttcaaggaatcctactccaagagggtctaatttcaacccttcagatttctactccatgatgggagttcagggattccctggaaggcattcaaatctcggcccggctgacttgtactcagtacaatcttcaagggggccaactccaaggccgtctaatttcgaggaaaattgtgctccaacggctactttatcctctcctaggttcgggttttatccagcacagacagtacccacgtcttatccggcacccaatcctgaatttgcctctactgtcactactaaaactgcaaaaaatcagcagcagcaaaatagcaaggcaaaccatgatgccaaggagctgcacatgttcgtgtggagctcgagtgcatcaccagtttctgaaggaggtgggctccacgtattcggtgggactgattttggtgcatcagagcaatctgggcggtctgatcagggcgccaaggagatcaggatgttggttgctgaccatccgcaaaatggggaaaccaaaactattccacaacaagatggagattttgctggcgaggacttcagttttgcgggcagaggagaaggagatgacgtcgaccaaagggaaaaagaggggcccactggacttaacaaactagggtccagctcaacagccgagttgcaaccaaaagcagccgaagctccagattccggtggcagtaggaagatgcctccggcaagcgttatgacccgtttgatattgatcatggtttggcgcaaacttattcgaaaccccaacacatactccagtctcattggtctcacttggtctctagtcgctttccggtggcatgtggaaatgcctaaaataataaaacagtcaatctccatactgtctgatgctggactcggaatggctatgttcagcttaggtctttttatggctttgcaaccgaagctgattgcttgtgggaactcggttgccacattcgccatggctgttcgattcttgactggccccgcggtgatggccgccgcttcaattgctgtcggcctccgcggtaccctccttcatgttgctattgttcaggccgcactgccacaaggaattgttccatttgtgtttgccaaggagtacaatgtccatccagccattctcagcaccgcggttatctttggaatgctgatagcattaccaattactcttgtttactacattttccttggattatga

SEQ ID NO: 96 - protein, 640 aa, Populus tremula x Populus tremuloides
MISWNDLYNVLSAVIPLYVAMILAYGSVRWWKIFSPDQCSGINRFVAIFAVPLLSFHFISTNDPYAMNFRFIAADTLQKIIMLIALGIWTNFTKNGSLEWMITIFSVSTLPNTLVMGIPLLTAMYGTYSGSLMVQIVVLQCIIWYTLLLFLFEYRGAKMLIMEQFPETAASIVSFKVDSDVVSLDGRDFLETDAEIGDDGKLHVTVRKSNASRRSLGPGSFSGMTPRPSNLTGAEIYSLSSSRNPTPRGSNFNPSDFYSMMGVQGFPGRHSNLGPADLYSVQSSRGPTPRPSNFEENCAPTATLSSPRFGFYPAQTVPTSYPAPNPEFASTVTTKTAKNQQQQNSKANHDAKELHMFVWSSSASPVSEGGGLHVFGGTDFGASEQSGRSDQGAKEIRMLVADHPQNGETKTIPQQDGDFAGEDFSFAGRGEGDDVDQREKEGPTGLNKLGSSSTAELQPKAAEAPDSGGSRKMPPASVMTRLILIMVWRKLIRNPNTYSSLIGLTWSLVAFRWHVEMPKIIKQSISILSDAGLGMAMFSLGLFMALQPKLIACGNSVATFAMAVRFLTGPAVMAAASIAVGLRGTLLHVAIVQAALPQGIVPFVFAKEYNVHPAILSTAVIFGMLIALPITLVYYIFLGL

SEQ ID NO: 97 - DNA, 1908 bp, Brassica juncea
  CDS (1)..(1908)
atgatctcatggcacgacctctatacggtcctcacggccgtgattcccctctacgtcgctatgatcctcgcctacggctctgtacggtggtggaaaatcttctcccccgaccaatgctccggaataaaccgtttcgtcgccatcttcgccgtccctctcctctctttccacttcatctccaccaacaacccttacgcaatgaacctccgtttcatcgcagcagacaccctccaaaaaatcctcatgctcgccctcttggtcctctgggctaacttcacccgctccggtagcctcgagtggagcatcacaatcttctccctctccacgctccccaacactctcgtcatggggatccctctcctgatcgccatgtacggcgagtacgccggatcgctcatggtccaggtcgtcgtcctccagtgtatcatatggtacacgcttctcctcttcctcttcgagtttcgcggcgccaagatgctcatcatggagcagttccccgagacggccgcttccatcgtttctttcaaagttgaatccgacgtcgtttcactagacggtcatgattttcttgagacggatgcggagataggaaacgacgggaagctccacgtcaccgtgaggaagtcaaacgcctcacgccgctctttctgtggacctaacatgactccacggccctcgaatctcaccggagctgagatttacagcttaagcaccactccaagaggctcaaacttcaacaactcagatttttactcgatgatgggctttcccggcggccgtctatccaacttcggcccggcggatatgtactccgtgcagtcttctagaggccccacaccgagaccttcgaacttcgaggagaatagcgctatggcttcctccccgaggttcgggtattatccaggaggaggaggcgggtcttacccggctccaaatcctgaattctcttcagcaaccgccacatctacagccaataaagtcgtcagtaaaaatcctacgaatcctcaaacgggcggcaaggcgaacaatcatgacgcgagcgccaaggaactacacatgttcgtgtggagctcaaacgggtcacccgtttcggaccgggcgggtcttaacgtttccgatggagcccctggttcgggatcaaacaacgaacaaggtgctaaagagatccgaatgttagtccctgatcaatctcagaccggagagaccaaagcttttgctcatcccgcgagtggagacttcggaggtgaacggtttagtttcgctggaagagaagaagaaggagagagggcaaaagacgccgagaatggattgaacaaacatgctcctagttcctcggcggagctacaatcaaaaacaggactgggagccgccggaggaggcgaagggagtcacgtgaaacatatgccgccggcgagtgtgatgacgaggctgatactgatcatggtatggaggaagctgatcagaaaccctaacacttactctagcctcattggcctcatttgggcgcttgttgctttccggtggcacgtggcaatgcccaaaatcattcaacaatctatctccattctatctgatgctggtcttggaatggctatgttcagtttggggttgttcatggcgttgcaacccaaattaatcgcttgtgggaactcagtggcaacatttgcgatggccgttaggttcctcactggtccggccgtcatggcggttgcctctatagccattggattgcatggtgatttactacgtgtcgccattgttcaggctgcactgcctcaagggattgtaccctttgtgtttgcaaaggagtacaatgttcatcctgctattttaagtacaggggtaatattcggaatgcttatagcgcttccgatcacgctggtttactacattctactagggttataa

SEQ ID NO: 98 - protein, 635 aa, Brassica juncea
MISWHDLYTVLTAVIPLYVAMILAYGSVRWWKIFSPDQCSGINRFVAIFAVPLLSFHFISTNNPYAMNLRFIAADTLQKILMLALLVLWANFTRSGSLEWSITIFSLSTLPNTLVMGIPLLIAMYGEYAGSLMVQVVVLQCIIWYTLLLFLFEFRGAKMLIMEQFPETAASIVSFKVESDVVSLDGHDFLETDAEIGNDGKLHVTVRKSNASRRSFCGPNMTPRPSNLTGAEIYSLSTTPRGSNFNNSDFYSMMGFPGGRLSNFGPADMYSVQSSRGPTPRPSNFEENSAMASSPRFGYYPGGGGGSYPAPNPEFSSATATSTANKVVSKNPTNPQTGGKANNHDASAKELHMFVWSSNGSPVSDRAGLNVSDGAPGSGSNNEQGAKEIRMLVPDQSQTGETKAFAHPASGDFGGERFSFAGREEEGERAKDAENGLNKHAPSSSAELQSKTGLGAAGGGEGSHVKHMPPASVMTRLILIMVWRKLIRNPNTYSSLIGLIWALVAFRWHVAMPKIIQQSISILSDAGLGMAMFSLGLFMALQPKLIACGNSVATFAMAVRFLTGPAVMAVASIAIGLHGDLLRVAIVQAALPQGIVPFVFAKEYNVHPAILSTGVIFGMLIALPITLVYYILLGL

SEQ ID NO: 99 - DNA, 1923 bp, Brassica juncea
  CDS (1)..(1923)
atgatctcgtggcacgacctctacacggtcctcactgccgtgattcctctctacgtcgctatgatcctcgcctacggctccgtacggtggtggaaaatcttctctcccgaccaatgctccggaatcaaccgttttgtcgccatcttcgccgtccctctcctctctttccacttcatctccaccaacaacccttacgccatgaacctccgtttcattgcagcagacacactccagaagatcctcatgctggccctcttagtcctttgggctaacttcacccgctccggtagcctcgagtggagcatcacgatcttctccctctccacgctccccaacacccttgtcatgggaatccctctcttgatcgccatgtacggcgagtacgccggttcactcatggtccaggtcgtcgtcctccagtgtatcatctggtacacgcttctccttttcctcttcgagtttcgcggcgccaagatgctcatcatggagcagttccccgagacggctgcttccatcgtttccttcaaggttgaatccgacgtcgtttctctcgacggccatgatttccttgagacggacgctgagattggagacgacgggaagctccacgtcaccgtgaggaaatcaaacgcttcacgtcgttctttctgcggaccgaacatgactccacgaccgtctaacctcaccggagctgagatttacagcttaagcaccactcctagaggctcaaacttcaacaattcagatttttactcgatgatgggcttcccgggcggccgtctctcaaacttcggtccggcggatatgtactccgtgcagtcttcgagaggtcccactccgagaccttcgaacttcgaagagaatagcgctatagcttcctccccgaggttcgggtattatccaggaggaggaggaggcgggtcttacccggctccgaatcctgagtttgcttcaacaaccaccacatctgcaaccaataaagccgtcagtaaaaatccaaaagacgtaaacacgaatcttcaaaccggtggcaaggcgaacaatcatgacgccagcgccaaggaactacacatgttcgtttggagctctaacgggtcgcccgtttcggaccgggcgggtcttaacgttttcgatggagctcctggttcaggatcaaacaacgaacaaggtgccaaagagatccgaatgttagtccctgatgaatctcagaacggagagaccaaagctttagctcgtccggcgagtggagaattcggaggtgaacggtttagtttcgctggaagagaagaagaaggagagagagcaaaagacgccgagaacggactgaacaaacatgctcctagttcctctgcggagctacaatcgaaaacaggactgggagccgccggaggaggtgaagcaagtcatgtaaaacatatgccgccggcgagcgtgatgacgaggctgatactgatcatggtgtggaggaagctaatcagaaaccctaacacttattctagcctcattggtctcatttgggcgcttgttgctttccggtggcacgtggcaatgcccaaaatcattcaacaatctatctccattctatctgatgctggtcttggaatggcaatgttcagtttggggttgttcatggcgttgcaacccaaattaatcgcttgtgggaactcagtggcaacatttgcgatggcggttaggttcctcaccggtccggccgtgatggcagttgcctctatagccattggattgcatggtgatttactgcgtgtcgccattgttcaggccgcactgcctcaagggattgtaccctttgtgtttgccaaggagtacaatgtccatcctgctattctaagtacaggtgtaatattcggaatgcttatagcgcttccaatcacgctggtttactacattctactcgggttgtaa

SEQ ID NO: 100 - protein, 640 aa, Brassica juncea
MISWHDLYTVLTAVIPLYVAMILAYGSVRWWKIFSPDQCSGINRFVAIFAVPLLSFHFISTNNPYAMNLRFIAADTLQKILMLALLVLWANFTRSGSLEWSITIFSLSTLPNTLVMGIPLLIAMYGEYAGSLMVQVVVLQCIIWYTLLLFLFEFRGAKMLIMEQFPETAASIVSFKVESDVVSLDGHDFLETDAEIGDDGKLHVTVRKSNASRRSFCGPNMTPRPSNLTGAEIYSLSTTPRGSNFNNSDFYSMMGFPGGRLSNFGPADMYSVQSSRGPTPRPSNFEENSAIASSPRFGYYPGGGGGGSYPAPNPEFASTTTTSATNKAVSKNPKDVNTNLQTGGKANNHDASAKELHMFVWSSNGSPVSDRAGLNVFDGAPGSGSNNEQGAKEIRMLVPDESQNGETKALARPASGEFGGERFSFAGREEEGERAKDAENGLNKHAPSSSAELQSKTGLGAAGGGEASHVKHMPPASVMTRLILIMVWRKLIRNPNTYSSLIGLIWALVAFRWHVAMPKIIQQSISILSDAGLGMAMFSLGLFMALQPKLIACGNSVATFAMAVRFLTGPAVMAVASIAIGLHGDLLRVAIVQAALPQGIVPFVFAKEYNVHPAILSTGVIFGMLIALPITLVYYILLGL

SEQ ID NO: 101 - DNA, 1920 bp, Brassica juncea
  CDS (1)..(1920)
atgatctcgtggcacgacctctacacggtcctcacggccgtgatacctctctacgtcgctatgatcctcgcctacggctctgtaaggtggtggaaaatcttctctcccgatcaatgctccggaatcaaccgtttcgtggccatattcgccgtccccctcctctccttccacttcatctccaccaacaatccatacgccatgaacctccgtttcatcgcagccgacactctccagaaaatcctcatgctcgccctcttagtcctctgggctaacttcacccgctccggtagcctcgagtggagcatcacaatcttctccctctccacacttcccaacacactcgtcatgggcatccctctcttgatcgccatgtacggcgaatacgctggttcgctcatggtccaagtcgtcgtcctccagtgtatcatctggtacacgcttctcctcttcctcttcgagtttcgcggcgccaagatgctcatcatggagcagttccctgagacggctgcttctatcgtttcgttcaaggttgaatccgacgtggtttccctcgacggccatgactttcttgagacggacgcggagatcggtaacgacgggaagcttcacgtcaccgtgaggaaatcaaacgcttcccgtcgttcgttctgcgggccgaacatgactccccggccgtctaatctcaccggagctgagatttacagcttaagcaccactcctagaggctcaaacttcaaccagtcagacttctattcgatgatgggtttcccgggcggccgtctctccaacttcgggccggcggacatgtactccatgcagtcttcaaggggccccactccaagaccttcgaatttcgaggagaattgcgccatggcttcctccccgaaatttgggtatcacccaggaggaggaggcgggtcttacccggctccaaatcctgagttctcttcaacatctacagccaacaaagtcgtcaataaaactcctaaagacaccaacacgaatcagcagacgaatcttcacaccgacggtaagtcaaacaatcatgacgctagctccaaggaactacacatgttcgtgtggagctccaacgggtcaccagtttcagaccgggcgggtcttaacgcccctgattcgggatcaaacaatgaacagggtggaagatctgaccaaggtgccaaagagatccggatgttagtccccgaccaatctcagaacagcgaaaacaaagctctggctcgtccggcgagtggtgacttcggaggtgaaccagttagtatcacccgaagagaagaaggagagagagcaaaagacgctgagaatggactgaacaaacctatacctaatgcgctgctacaatcgaagacaggactcggagccgtccctggaggtgaagcaagtcaagggaaacatatgccgcctgcgagcgtgatgacgaggctgatactgatcatggtgtggaggaagttaatcagaaacccaaacacttactctagcctcattggcctcatctgggctctggttgctttccggtggcatgtggcaatgcccaaaattatacagcaatctatctccattctatctgatgctggtcttggaatggcaatgttcagtttggggttgttcatggcattgcaacccaaattaatcgcttgtgggaactcagtggcaacatttgcgatggcggttaggttcctcacaggtccggccgtgatggcagttgcctcaatagctattggattgcgtggtgatttactgcgtgtcgccattgttcaggccgcattgcctcaagggattgtaccgtttgtgtttgccaaagagtacaatgttcatcctgctattttaagtacaggggtaatattcggaatgcttatagcgcttcctatcacgctggtttactatattctactcgggttatga

SEQ ID NO: 102 - protein, 639 aa, Brassica juncea
MISWHDLYTVLTAVIPLYVAMILAYGSVRWWKIFSPDQCSGINRFVAIFAVPLLSFHFISTNNPYAMNLRFIAADTLQKILMLALLVLWANFTRSGSLEWSITIFSLSTLPNTLVMGIPLLIAMYGEYAGSLMVQVVVLQCIIWYTLLLFLFEFRGAKMLIMEQFPETAASIVSFKVESDVVSLDGHDFLETDAEIGNDGKLHVTVRKSNASRRSFCGPNMTPRPSNLTGAEIYSLSTTPRGSNFNQSDFYSMMGFPGGRLSNFGPADMYSMQSSRGPTPRPSNFEENCAMASSPKFGYHPGGGGGSYPAPNPEFSSTSTANKVVNKTPKDTNTNQQTNLHTDGKSNNHDASSKELHMFVWSSNGSPVSDRAGLNAPDSGSNNEQGGRSDQGAKEIRMLVPDQSQNSENKALARPASGDFGGEPVSITRREEGERAKDAENGLNKPIPNALLQSKTGLGAVPGGEASQGKHMPPASVMTRLILIMVWRKLIRNPNTYSSLIGLIWALVAFRWHVAMPKIIQQSISILSDAGLGMAMFSLGLFMALQPKLIACGNSVATFAMAVRFLTGPAVMAVASIAIGLRGDLLRVAIVQAALPQGIVPFVFAKEYNVHPAILSTGVIFGMLIALPITLVYYILLGL

SEQ ID NO: 103 - DNA, 1845 bp, Populus tremula x Populus tremuloides
  CDS (1)..(1845)
atgatttctttaacagatttctaccatgtaatgactgcaatggtgccactttacgtggccatgatcttagcctacggctcggtgaaatggtggaagatcttcactcctgatcagtgctcaggcataaaccgttttgtggctctttttgcagtccctctcctctctttccacttcatatctaccaatgatccttataatatgaaccttcgtttcataactgctgattctctacaaaaggtcattgttttggtagtattagcactttggactaagttgagtaaaaggggttgcttggaatggaccattacattgttctctctttcaaccctgccgaacactcttgttatgggcattcctttgctcaaaggaatgtatggtgattactctggtagtttaatggtgcaagttgttgtccttcaatgtatcatttggtacactttgatgttgtttatgttcgaatataggggtgctaaactgctcatctctgagcaattcccagacactgctggttccattgtgtcaatccatgttgattctgatatcatgtcacttgatggtagacagcctctagaaaccgaagcagcgatcaaagaagatggaaagctacatgtcactgttaggaaatccaatgcttcaagatcagatattttctcaagaaggtctcaaggtctgtcatcaacaacaccaagaccatcaaatctcacaaatgcagagatttactccttacaatcatcaagaaacccaactccaagagggtctagcttcaaccatacagatttctactcgatgatggctgctggtagaaactctaattttggtgcttcagatgtttatggactatcagcatcgaggggaccgacaccacggccatcaaattttgaagaagaacatggtggaagtaacaaaccaaggttccaccattaccacgcgccaggtggtgcaactcattatccagcaccaaaccctggcatgttctctccaacaaccgctgcatctaaaggtgtttctgccaatgctaataatgctgctgctgctgctgcaaagaagcctaatggccaagcccagcagaaagctgaagatggtagggaccttcacatgtttgtttggagttcaagcgcttctcctgtttcagatgtttttggtggccatgattatggcgcccatgacctgaaagatgttagagttgctgtatcccctggaaaagtagaggggcagagagaaaaccaggaggactataatttggagagggatgattttagctttggaaatagagggttggacagagaaaggaatagccatgaaggtgagaaaggcggttttgatgggaaaccaaaagcaatgcctccaacaagtgtcatgacaaggctcatactaatcatggtctggagaaaacttatcagaaatcccaacacttactccagcttaattggtctcatttggtctttagtttctttcaggtggaatgtaaagatgccactcattatagcaaagtccatttccattctgtcagatgcagggcttggcatggcaatgttcagtcttggtctgttcatggctttgcaaccaaggatcatagcatgtggaaattccattgcaactttttctatggctgtgagattccttacaggtccagctatcatggcagctgcttctattgctgttggtattagaggcacgctcttacacatcgccattgttcaggcagctctaccacaaggaatagtcccctttgtctttgccaaggagtacaacgtgcatcctgaaattctcagtacaggtgtcatatttgggatgttgattgcattgcccataactcttgtttactacattttgttgggactatga

SEQ ID NO: 104 - protein, 614 aa, Populus tremula x Populus tremuloides
MISLTDFYHVMTAMVPLYVAMILAYGSVKWWKIFTPDQCSGINRFVALFAVPLLSFHFISTNDPYNMNLRFITADSLQKVIVLVVLALWTKLSKRGCLEWTITLFSLSTLPNTLVMGIPLLKGMYGDYSGSLMVQVVVLQCIIWYTLMLFMFEYRGAKLLISEQFPDTAGSIVSIHVDSDIMSLDGRQPLETEAAIKEDGKLHVTVRKSNASRSDIFSRRSQGLSSTTPRPSNLTNAEIYSLQSSRNPTPRGSSFNHTDFYSMMAAGRNSNFGASDVYGLSASRGPTPRPSNFEEEHGGSNKPRFHHYHAPGGATHYPAPNPGMFSPTTAASKGVSANANNAAAAAAKKPNGQAQQKAEDGRDLHMFVWSSSASPVSDVFGGHDYGAHDLKDVRVAVSPGKVEGQRENQEDYNLERDDFSFGNRGLDRERNSHEGEKGGFDGKPKAMPPTSVMTRLILIMVWRKLIRNPNTYSSLIGLIWSLVSFRWNVKMPLIIAKSISILSDAGLGMAMFSLGLFMALQPRIIACGNSIATFSMAVRFLTGPAIMAAASIAVGIRGTLLHIAIVQAALPQGIVPFVFAKEYNVHPEILSTGVIFGMLIALPITLVYYILLGL

SEQ ID NO: 105 - DNA, 1779 bp, Oryza sativa
  CDS (1)..(1779)
atgataacgggggcggacttctaccacgtgatgacggcgatggtgccgctgtacgtggcgatgatcctggcgtacgggtcggtgaagtggtggcgcatcttcacgcccgaccagtgctccgggatcaaccgcttcgtggcgctcttcgccgtcccgctcctctccttccacttcatctccaccaacaacccctacaccatgaacctccgcttcatcgccgccgacaccctgcagaagctcatcgtcctcgcgctcctcaccctgtggagccacctctcccgccgcggctccctcgagtggaccatcaccctcttctccctctccacgctgcccaacacgctcgtcatggggatcccgctgctgaaggggatgtacggggagttctccggtagcctcatggtgcagatcgtggtgctccagtgcatcatctggtacacgctgatgctcttcatgttcgagtaccgcggcgccaggatcctcatcaccgagcagttcccggacaccgcgggcgccatcgcgtccatcgtcgtggacgccgacgtcgtgtcgctcgacgggcggagggacatgatcgagacggaggccgaggtgaaggaggacggcaagatacacgtcaccgtgcgccgctccaacgcgtcgcgctccgacgtctactcgcggcgctccatggggttctccagcaccacgccgcggccgagcaacctcaccaacgccgagatctactcgctgcagtcgtcgcgcaacccgacgccgcggggctccagcttcaaccacactgacttctactccatggtcgggcgcagctccaacttcgccgccggggacgcgttcggggtgcgcaccggcgccacgccgcggccgtccaactacgaggaggacgcggcggcgcccaacaaggccggcagcaagtacgggcagtacccggcgcccaacccggccatggcggcgccgcccaagcccaagaaggcggccaacggccaggccaagggcgaggacggcaaagacctccacatgttcgtctggagctccagcgcgtcgcccgtgtccgacgtcttcggcaacggcgccgagtacaacgacgccgccgccgtcaaggaggtccgcatggccgtcgcctcgccgcgcaaagcggacggcgtggagagggacgacttcagcttcgggaacagaggcgtcgccgagagggacgcggaggccggcgacgagaagagcgtggcggcggcggtgtcgggtgagcatggcaagcctggcttgacgccggcgccgacggcgatgccgccgacgagcgtgatgacgcggctcatcctgatcatggtgtggcgcaagctcatccgcaaccccaacacctactccagcctcatcggcctcatctggtcgctcgtctgcttccggtggaacttcgagatgccggcgatcatcctgaaatccatctccatcctctccgacgccggcctcggcatggccatgttcagcctcgggctgttcatggcgctgcagccgcggatcatcgcgtgcgggaacaaggtggcgacgttcgccatggcggtgcggttcctgaccggcccggccgtcatggccgccgcctccatcgccgtcggcctccgcggcacgctcctccacgtcgccatcgtgcaggcagcgttgccacagggcattgtccccttcgtcttcgccaaggagtacagcgtgcaccccgacattctcagcacggcggtcatctttggcatgctcatcgcgctgcccatcacgctggtgtactacatcctgctggggctgtga

SEQ ID NO: 106 - protein, 592 aa, Oryza sativa
MITGADFYHVMTAMVPLYVAMILAYGSVKWWRIFTPDQCSGINRFVALFAVPLLSFHFISTNNPYTMNLRFIAADTLQKLIVLALLTLWSHLSRRGSLEWTITLFSLSTLPNTLVMGIPLLKGMYGEFSGSLMVQIVVLQCIIWYTLMLFMFEYRGARILITEQFPDTAGAIASIVVDADVVSLDGRRDMIETEAEVKEDGKIHVTVRRSNASRSDVYSRRSMGFSSTTPRPSNLTNAEIYSLQSSRNPTPRGSSFNHTDFYSMVGRSSNFAAGDAFGVRTGATPRPSNYEEDAAAPNKAGSKYGQYPAPNPAMAAPPKPKKAANGQAKGEDGKDLHMFVWSSSASPVSDVFGNGAEYNDAAAVKEVRMAVASPRKADGVERDDFSFGNRGVAERDAEAGDEKSVAAAVSGEHGKPGLTPAPTAMPPTSVMTRLILIMVWRKLIRNPNTYSSLIGLIWSLVCFRWNFEMPAIILKSISILSDAGLGMAMFSLGLFMALQPRIIACGNKVATFAMAVRFLTGPAVMAAASIAVGLRGTLLHVAIVQAALPQGIVPFVFAKEYSVHPDILSTAVIFGMLIALPITLVYYILLGL

SEQ ID NO: 107 - DNA, 1788 bp, Oryza sativa
  CDS (1)..(1788)
atgattacggcggcggacttctaccacgtgatgacggcgatggtgccgttgtacgtggcgatgatactggcgtacgggtcggtgaagtggtggcgcatcttcacgccggaccagtgctccgggatcaaccgcttcgtggcgctcttcgccgtgccgctgctgtcgttccacttcatctccaccaacaacccgtacacgatgaacctccggttcatcgccgccgacacgctgcagaagctgatggtgctggccatgctcacggcgtggagccacctcagccgccgggggagcctcgagtggaccatcacgctcttctccctctccacgctgcccaacacgctcgtcatggggatccctttgctcaagggcatgtacggggagttctccggcagcctcatggtgcagatcgtcgtgctgcagtgcatcatctggtacacgctcatgctcttcatgttcgagtaccgcggcgcccggatgctcatcaccgagcagttcccggacaccgccgccaacatcgcctccatcgtcgtcgacccggacgtcgtgtcgctggacggcaggagggacgccatcgagacggagacggaggtgaaggaggacggcaggatacacgtcaccgtgcgccgctccaacgcgtctcgctcggacatctactcccgccgctccatgggcttctccagcaccacgccgcggccgagcaacctcaccaacgccgagatctactcgctgcagtcgtcgcggaacccgacgccgaggggttcaagcttcaaccacaccgacttctactccatggtgggccgcagctccaacttcggcgcggccgacgcgttcggcgtccgcaccggcgccacgccgcgcccgtccaactacgaggacgacgcgtccaagcccaagtacccgctcccggcgtcgaatgcggcgcccatggcgggccactacccggcgccgaacccggccgtgtcgtcggcgcccaagggcgccaagaaggcggccacgaacgggcaggccaagggcgaggacctccacatgttcgtctggagctccagcgcgtcgcccgtgtccgacgtcttcggcggcggcgcgccagactacaacgacgccgcggcagtcaagtccccccgcaaaatggatggagcgaaggacagggaggactacgtggagcgggacgatttcagcttcgggaacaggggcgtcatggacagggacgcggaggcaggggacgagaaggcggcggcggcggcgggcgccgaccccagcaaggccatggcggcgccgacggcgatgccgccgacgagcgtgatgacccgcctcatcctgatcatggtgtggcgcaagctcatccgcaacccgaacacctactccagcctcatcggcctcatctggtccctcgtctgcttcaggtggaacttcgagatgccggccatcgtcctgaaatccatctcgatcctgtcggacgcggggctcggcatggccatgttcagtctcggtctgttcatggcgctgcagccgcacatcatcgcgtgcgggaacaaggtggcgacgtacgccatggcggtgcggttcctggccgggccggccgtgatggcggcggcgtccttcgccgtcggactccgtggcacgctcctgcacgtcgccattgtccaggcagctctgccccagggcattgtccccttcgtcttcgccaaggagtacagcgtgcaccctagcattctcagcacagctgtcatctttggcatgctcatcgccttgcctatcaccctcgtctactacatcttgcttgggctgtaa

SEQ ID NO: 108 - protein, 595 aa, Oryza sativa
MITAADFYHVMTAMVPLYVAMILAYGSVKWWRIFTPDQCSGINRFVALFAVPLLSFHFISTNNPYTMNLRFIAADTLQKLMVLAMLTAWSHLSRRGSLEWTITLFSLSTLPNTLVMGIPLLKGMYGEFSGSLMVQIVVLQCIIWYTLMLFMFEYRGARMLITEQFPDTAANIASIVVDPDVVSLDGRRDAIETETEVKEDGRIHVTVRRSNASRSDIYSRRSMGFSSTTPRPSNLTNAEIYSLQSSRNPTPRGSSFNHTDFYSMVGRSSNFGAADAFGVRTGATPRPSNYEDDASKPKYPLPASNAAPMAGHYPAPNPAVSSAPKGAKKAATNGQAKGEDLHMFVWSSSASPVSDVFGGGAPDYNDAAAVKSPRKMDGAKDREDYVERDDFSFGNRGVMDRDAEAGDEKAAAAAGADPSKAMAAPTAMPPTSVMTRLILIMVWRKLIRNPNTYSSLIGLIWSLVCFRWNFEMPAIVLKSISILSDAGLGMAMFSLGLFMALQPHIIACGNKVATYAMAVRFLAGPAVMAAASFAVGLRGTLLHVAIVQAALPQGIVPFVFAKEYSVHPSILSTAVIFGMLIALPITLVYYILLGL

SEQ ID NO: 109 - DNA, 1893 bp, Oryza sativa
  CDS (1)..(1893)
atgatcaccggacgcgacatctacgacgtgctggcggcgatcgtgccgctgtacgtggcgatgttcctggcgtacgggtcggtgcggtggtgggggatattcacgccggaccagtgctccggcatcaaccgcttcgtcgccgtcttcgccgtgccgctcctctccttccacttcatctccaccaacgacccctactccatgaactaccgcttcctcgccgccgactcgctccagaagctcgtcatcctcgccgcgctcgccgtctggcacaacctgctctcccgctaccgccgcaatggcggcgccgccgcgtcgctcgactggaccatcaccctcttctcgctgtccacgctgcccaacacgctggtcatgggcatcccgctgctccgcgccatgtacggcgacttctccggctcgctcatggtgcagatcgtcgtgctccagagcgtcatctggtacaccctcatgctcttcctcttcgagtaccgcggcgccaaggcgctcatctccgagcagttcccgccggacgtcggcgccagcatcgcctcgttccgcgtcgactccgacgtcgtctcgctcaacgggagggaggcgctgcaggcggacgccgaggtggggcgcgacggccgcgtccacgtcgtcatccgccgctccgcctcggcctccaccacgggcggcggcggcggcgcggcgcgctccggcgtgtcccgggcgtacggcgcgtccaacgccatgacgccgcgcgcctccaacctcaccggcgtggagatctactcgctgcagacgtcgcgcgagcccacgccgcgggcgtccagcttcaaccaggccgacttctacgccatgttctccggcagcaagatggccagccagatggctagccccatggcgcagcacggcggcgccggcggccgcgcccagggcctcgacgagcaggtcaccaacaagttcgcctccggcaaggccgccgacccgccgtcgtatcccgccccgaaccccggcatgatgccggcgccaaggaagaaggagctcgggggctcaaactccaactccaacaaggagctacacatgttcgtgtggagctctagcgcgtcgccggtgtcggaggccaacctccgcaacgccgtcaaccacgccgcctccaccgacttcgcctccgcgccgccgccggcagccgttcccgtcggcggcgccactcccaaaggggtgagtggcagtgtcacgccggcggcgaagaacggcggcggcgagttggagatcgaggacgggctgaagagcccggcggcggggctggcggcgaagttcccggtgtcggggtcgccgtacgtggcgccgaggaagaagggcggcggcgccgacgtgcccgggctggcggaggcggcgcacccgatgccgccgacgagcgtgatgacgcggctcatcctcatcatggtgtggcgcaagctcatcagaaaccccaacacctactccagcctcatcggcctcgtctggtccctcgtctccttcaggtggaatatccaaatgccttcaataataaagggctcaatatcaatattgtcagatgcagggctaggaatggctatgttcagcttaggcttgttcatggctctgcaaccaaagatcatttcttgtggcaagaccgttgcgacatttgcaatggcagtgaggttcttgactggtccagctgttattgcagctacttccattgccattgggctcaggggagtactcttgcatgttgccattgttcaggcagcacttccacaaggcattgtcccgtttgtgtttgccaaggagtacaattgccatcctcaaatacttagcacagcggttatttttgggatgctcatcgcgcttccgatcacgatactctactatgtgcttcttgggatatag

SEQ ID NO: 110 - protein, 630 aa, Oryza sativa
MITGRDIYDVLAAIVPLYVAMFLAYGSVRWWGIFTPDQCSGINRFVAVFAVPLLSFHFISTNDPYSMNYRFLAADSLQKLVILAALAVWHNLLSRYRRNGGAAASLDWTITLFSLSTLPNTLVMGIPLLRAMYGDFSGSLMVQIVVLQSVIWYTLMLFLFEYRGAKALISEQFPPDVGASIASFRVDSDVVSLNGREALQADAEVGRDGRVHVVIRRSASASTTGGGGGAARSGVSRAYGASNAMTPRASNLTGVEIYSLQTSREPTPRASSFNQADFYAMFSGSKMASQMASPMAQHGGAGGRAQGLDEQVTNKFASGKAADPPSYPAPNPGMMPAPRKKELGGSNSNSNKELHMFVWSSSASPVSEANLRNAVNHAASTDFASAPPPAAVPVGGATPKGVSGSVTPAAKNGGGELEIEDGLKSPAAGLAAKFPVSGSPYVAPRKKGGGADVPGLAEAAHPMPPTSVMTRLILIMVWRKLIRNPNTYSSLIGLVWSLVSFRWNIQMPSIIKGSISILSDAGLGMAMFSLGLFMALQPKIISCGKTVATFAMAVRFLTGPAVIAATSIAIGLRGVLLHVAIVQAALPQGIVPFVFAKEYNCHPQILSTAVIFGMLIALPITILYYVLLGI

SEQ ID NO: 111 - DNA, 1857 bp, Oryza sativa
  CDS (1)..(1857)
atgatatccgggcacgacttctacacggtgatggcggcggtggtgccgctgtacgtggcgatgttcctggcgtacgggtcggtgcggtggtggggcatcttcacgccggaccagtgctccggcatcaaccgcttcgtcgccatcttcgccgtgccgctcctgtccttccacttcatctccaccaacgacccgtacgccatgaacctccgcttcctggcggcggacacgctgcagaagctgctcgtcctggcggggctcgccgcgtggtcgcgcctcccctcgcggaccggcgcgccgcggctggactggtccatcacgctcttctccctctccacgctgcccaacacgctcgtcatggggatcccgctgctgatcgccatgtacgggccatactccggctcgctcatggtccagatcgtcgtgctccagtgcatcatctggtacacgctgatgctcttcctcttcgagttccgcgccgcgcggatgctgatcgccgaccagttcccggacacggcggcgtccatcgtgtccctgcacgtcgacccggacgtggtgtcgctggagggcggccacgcggagacggaggccgaggtggcggcggacgggcggctgcacgtcaccgtgcgccggtcctcggtgtcgcggcggtcgctgctggtcacgccgcggccgtcgaacctgacgggagcggagatctactcgcttagctcgtcgcggaacccaaccccgcggggctccaacttcaaccacgccgacttcttcgccatggtcggcggcgggccaccgcccccgacgcccgctgcggtgcgcggctcgagcttcggcgcctccgagctctactcgctgcaatcgtcgcggggcccaaccccgaggcagtccaacttcgacgagcactcggcacggccgccgaaaccaccggcaacgaccacgggggcactcaaccacgatgccaaggagctccacatgttcgtgtggagctcgagcgcgtctcccgtctcagaagtcagcggcctgcctgtgttcagtggcggcggcggcggcggcgctctcgacgtcggcgccaaggaaatccacatggtcatccccgccgacctgccgcagaacaacggctcaggcaaagagcacgaggagtacggcgcagtggcattgggtggcggcggcggcggagagaacttcagcttcggaggcggcaagacggtggacggcgccgaggcagtagacgaggaggcggccttgcctgacgggctgacgaagatggggtcgagctcgacggcggagctgcacccgaaggtcgtcgacgtcgacggaccgaacgccggcggcggcgccgcgggcgcggggcagtaccaaatgccgccggcgagcgtgatgacacgcctcatcctcataatggtgtggcgcaagctcatccgcaaccccaacacttactccagcctcctcggcctcgcctggtccctcgtcgccttccggtggcacgtctccatgccagcaatcgtcgagaagtccatctccattctctcggacgcaggcctggggatggccatgtttagcctgggattgttcatggcgctgcagcccagcatcatcgcgtgtggcaaatcagccgccgtcgtctccatggccgtccgcttcctcgcgggccctgccgtcatggccgccgcgtcaatcgccatcggactccgcgggacgctcctgcacgtcgccattgttcaggcggctctaccacaagggattgtgccttttgtttttgcaaaagaatacaatgtccacccggccatcctgagcacagcggtaatttttggcatgctaatagctcttccaatcacattgctgtactacatccttcttggactatga

SEQ ID NO: 112 - protein, 618 aa, Oryza sativa
MISGHDFYTVMAAVVPLYVAMFLAYGSVRWWGIFTPDQCSGINRFVAIFAVPLLSFHFISTNDPYAMNLRFLAADTLQKLLVLAGLAAWSRLPSRTGAPRLDWSITLFSLSTLPNTLVMGIPLLIAMYGPYSGSLMVQIVVLQCIIWYTLMLFLFEFRAARMLIADQFPDTAASIVSLHVDPDVVSLEGGHAETEAEVAADGRLHVTVRRSSVSRRSLLVTPRPSNLTGAEIYSLSSSRNPTPRGSNFNHADFFAMVGGGPPPPTPAAVRGSSFGASELYSLQSSRGPTPRQSNFDEHSARPPKPPATTTGALNHDAKELHMFVWSSSASPVSEVSGLPVFSGGGGGGALDVGAKEIHMVIPADLPQNNGSGKEHEEYGAVALGGGGGGENFSFGGGKTVDGAEAVDEEAALPDGLTKMGSSSTAELHPKVVDVDGPNAGGGAAGAGQYQMPPASVMTRLILIMVWRKLIRNPNTYSSLLGLAWSLVAFRWHVSMPAIVEKSISILSDAGLGMAMFSLGLFMALQPSIIACGKSAAVVSMAVRFLAGPAVMAAASIAIGLRGTLLHVAIVQAALPQGIVPFVFAKEYNVHPAILSTAVIFGMLIALPITLLYYILLGL

SEQ ID NO: 113 - DNA, 1923 bp, Arabidopsis thaliana; identical to SEQ ID NO: 3
  CDS (1)..(1923)

SEQ ID NO: 114 - protein, 640 aa, Arabidopsis thaliana
MISWHDLYTVLTAVIPLYVAMILAYGSVRWWKIFSPDQCSGINRFVAIFAVPLLSFHFISTNNPYAMNLRFIAADTLQKIIMLSLLVLWANFTRSGSLEWSITIFSLSTLPNTLVMGIPLLIAMYGEYSGSLMVQIVVLQCIIWYTLLLFLFEFRGAKMLIMEQFPETAASIVSFKVESDVVSLDGHDFLETDAEIGDDGKLHVTVRKSNASRRSFCGPNMTPRPSNLTGAEIYSLSTTPRGSNFNHSDFYNMMGFPGGRLSNFGPADMYSVQSSRGPTPRPSNFEENCAMASSPRFGYYPGGGAGSYPAPNPEFSSTTTSTANKSVNKNPKDVNTNQQTTLPTGGKSNSHDAKELHMFVWSSNGSPVSDRAGLNVFGGAPDNDQGGRSDQGAKEIRMLVPDQSHNGETKAVAHPASGDFGGEQQFSFAGKEEEAERPKDAENGLNKLAPNSTAALQSKTGLGGAEASQRKNMPPASVMTRLILIMVWRKLIRNPNTYSSLIGLIWALVAFRWHVAMPKIIQQSISILSDAGLGMAMFSLGLFMALQPKLIACGNSVATFAMAVRFLTGPAVMAVAAIAIGLRGDLLRVAIVQAALPQGIVPFVFAKEYNVHPAILSTGVIFGMLIALPITLVYYILLGL

SEQ ID NO: 115 - DNA, 1851 bp, Arabidopsis thaliana
  CDS (1)..(1851)
atgattacgtggcacgacttgtacaccgtcctcaccgccgtggtaccactttacgtagctatgattctcgcctacggatccgtacagtggtggaagatattctcaccagaccagtgctccggcatcaaccgcttcgtcgctatcttcgccgtccctctcctctccttccacttcatctccaccaacgatccttacgccatgaatttccgcttcgtcgccgccgacacgcttcaaaaaatcatcatgctcgtcttacttgctctatgggctaacctaaccaagaacggtagcttggagtggatgatcacaatcttctctctcagcactctcccaaacactcttgtcatggggatccctctgttgatcgccatgtacggaacctacgcaggttctctaatggtccaagtcgttgttcttcagtgtatcatttggtacactctccttctcttcctcttcgagtaccgtggcgctaagcttcttattatggagcagttcccggagactggtgcgtctattgtttcgtttaaagttgaatccgacgtcgtttctctcgacggtcatgattttcttgagacggatgctgagataggaaacgacgggaagcttcatgttaccgtgaggaaatcaaacgcatcgagacggtcactgatgatgactccacggccttcgaatcttaccggagctgagatctatagtcttagttcgactccgagaggttctaactttaaccattctgatttttactctgttatggggtttcccggcgggaggctttcgaattttggtccggcggatttgtactccgttcaatcttctcgtggtccgactccacggccttcgaacttcgaagagaacaacgccgttaaatatggattttacaataacactaacagttctgttccggcggccggttcgtacccggctccgaacccggagttttcaaccggtacgggtgtttcaactaaaccgaataaaattcctaaagaaaaccaacagcaactgcaagagaaagatagcaaagcgagccatgacgctaaggagcttcacatgtttgtttggagctcaagcgcttctccggtctccgacgtgtttggcggaggtgcaggcgacaacgtggcaacggaacaatctgaacaaggtgctaaggagattcggatggttgtctctgatcaacctcgaaagagtaatgctagaggtggtggtgatgatatcggcggtcttgatagtggagagggagaaagagagatagagaaagctacagcagggctgaataaaatggggtctaattccacggcggagctagaggcggctggtggagatggcggcggcaacaacggaacacatatgccgccgacaagtgtgatgacacgactgatattgataatggtgtggagaaagctgatcagaaacccaaacacgtactccagtctaatcggtctcatatgggctcttgttgcttaccggtggcatgtggctatgcccaaaatattacaacaatccatctccatactctcagatgctggtcttggaatggctatgttcagcttaggtttattcatggcacttcaacccaaaatcattgcttgtgggaactctgtcgccacgtttgccatggcggtcagatttataaccggtccggccatcatggctgttgctgggattgccattggcttacacggcgaccttctccgtatagccatcgttcaggctgcgttgcctcaaggaatagttccgtttgtgtttgcaaaagagtacaatgtgcatcccacgattctaagcactggggtcatatttggaatgttaatagccttacctataactctggtctactatattcttcttggcctttga

SEQ ID NO: 116 - protein, 616 aa, Arabidopsis thaliana
MITWHDLYTVLTAVVPLYVAMILAYGSVQWWKIFSPDQCSGINRFVAIFAVPLLSFHFISTNDPYAMNFRFVAADTLQKIIMLVLLALWANLTKNGSLEWMITIFSLSTLPNTLVMGIPLLIAMYGTYAGSLMVQVVVLQCIIWYTLLLFLFEYRGAKLLIMEQFPETGASIVSFKVESDVVSLDGHDFLETDAEIGNDGKLHVTVRKSNASRRSLMMTPRPSNLTGAEIYSLSSTPRGSNFNHSDFYSVMGFPGGRLSNFGPADLYSVQSSRGPTPRPSNFEENNAVKYGFYNNTNSSVPAAGSYPAPNPEFSTGTGVSTKPNKIPKENQQQLQEKDSKASHDAKELHMFVWSSSASPVSDVFGGGAGDNVATEQSEQGAKEIRMVVSDQPRKSNARGGGDDIGGLDSGEGEREIEKATAGLNKMGSNSTAELEAAGGDGGGNNGTHMPPTSVMTRLILIMVWRKLIRNPNTYSSLIGLIWALVAYRWHVAMPKILQQSISILSDAGLGMAMFSLGLFMALQPKIIACGNSVATFAMAVRFITGPAIMAVAGIAIGLHGDLLRIAIVQAALPQGIVPFVFAKEYNVHPTILSTGVIFGMLIALPITLVYYILLGL

SEQ ID NO: 117 - DNA, 1281 bp, Oryza sativa
  CDS (1)..(1281)
atgattacgggttcggaggtgtaccaggtggtggaggcgatggcgccgctgtacacggcggcggcgctggggtacgggtcggtgcggtggctgaaggcgttctccaacgagcagtgcgccgggatcaaccacttcgtggcgctctacgccgtgccggtgctcatcttcgacatggtgtccaccaacaacgtgtacaagatgaacggccgcctcatcgccgccgacacgctgcagaaggccgtgctgctgctgggcctcatggcgtgggcgctctgggagcggtcgcgcgcgcgcggcgccggggccaaggccaaggcggcggtgtcgtcgccgctgcagtgggtcatcacctgcttctccgtcgcgtcgctgcccaacaccatcatcatgggcgtcccgctcctcaacggcatgtacgggcccgtgtccaaggacctcatgaagcagatcgtcgtcatgcagttctgcatctggtacaacgtcatcatcttcctctacgagtacatggcggcgcgtagatcggcctcggcgccgccgccggcgtcgtcggagggcagcgccaagatcagcccttcgtcgccggtgaaagctgctgcggcggcggcggacacaaacggcaatgctgtcgcggccgaccggccgcaagaagtggcggtgaacatcgaaatcacggagatggcggcgtccacggcacgagacggcgtgtccggcgagacgacggcggccgccaaggaggtgagctctggtgaagttgctccggtggaagaggaggaggcgtctgcgccagcgccgtcgatgaagcacgtcatctggatggcggtgaagaagctgctacagattccgaatacctatgcaagcttccttggcctcatctggtctctaatcgcattcaagtgtggattctcgatgccaaaaatcgtcgaggactctctgttcaccattcgtaccaccgctgtaggcctaagcatgttttcttcagggacgttcatagcgcggcagtcgcggttcgtgccgtgcggatacaagatagcgtcgttctccatggtcatcaagtttctgataggcccggttgtgatgctgttcgcctcgctcgtcatcggcatgcacggcacacttctgcacatcgctgttgtgcaggcggctctccccctggcagtgacatcatttgtgtacgctgaagagtacaaggtccacgcagacatcatgagcacaggggttattcttgggatatttatatcacttcctgtgacaattgtttactatattctgttggggctgtga

SEQ ID NO: 118 - protein, 426 aa, Oryza sativa
MITGSEVYQVVEAMAPLYTAAALGYGSVRWLKAFSNEQCAGINHFVALYAVPVLIFDMVSTNNVYKMNGRLIAADTLQKAVLLLGLMAWALWERSRARGAGAKAKAAVSSPLQWVITCFSVASLPNTIIMGVPLLNGMYGPVSKDLMKQIVVMQFCIWYNVIIFLYEYMAARRSASAPPPASSEGSAKISPSSPVKAAAAAADTNGNAVAADRPQEVAVNIEITEMAASTARDGVSGETTAAAKEVSSGEVAPVEEEEASAPAPSMKHVIWMAVKKLLQIPNTYASFLGLIWSLIAFKCGFSMPKIVEDSLFTIRTTAVGLSMFSSGTFIARQSRFVPCGYKIASFSMVIKFLIGPVVMLFASLVIGMHGTLLHIAVVQAALPLAVTSFVYAEEYKVHADIMSTGVILGIFISLPVTIVYYILLGL

SEQ ID NO: 119 - DNA, 1860 bp, Arabidopsis thaliana; identical to SEQ ID NO: 7
  CDS (1)..(1860)

SEQ ID NO: 120 - protein, 619 aa, Arabidopsis thaliana
MITWHDLYTVLTAVIPLYVAMILAYGSVRWWKIFSPDQCSGINRFVAIFAVPLLSFHFISSNNPYAMNLRFIAADTLQKLIMLTLLIIWANFTRSGSLEWSITIFSLSTLPNTLVMGIPLLIAMYGEYSGSLMVQIVVLQCIIWYTLLLFLFEYRGAKILIMEQFPETGASIVSFKVESDVVSLDGHDFLETDAQIGDDGKLHVTVRKSNASRRSFYGGGGTNMTPRPSNLTGAEIYSLNTTPRGSNFNHSDFYSMMGFPGGRLSNFGPADMYSVQSSRGPTPRPSNFEESCAMASSPRFGYYPGGAPGSYPAPNPEFSTGNKTGSKAPKENHHHVGKSNSNDAKELHMFVWGSNGSPVSDRAGLQVDNGANEQVGKSDQGGAKEIRMLISDHTQNGENKAGPMNGDYGGEEESERVKEVPNGLHKLRCNSTAELNPKEAIETGETVPVKHMPPASVMTRLILIMVWRKLIRNPNTYSSLIGLIWALVAFRWDVAMPKIIQQSISILSDAGLGMAMFSLGLFMALQPKLIACGNSTATFAMAVRFFTGPAVMAVAAMAIGLRGDLLRVAIVQAALPQGIVPFVFAKEYNVHPAILSTGVIFGMLIALPITLVYYILLGL

SEQ ID NO: 121 - DNA, 1869 bp, Arabidopsis thaliana
  CDS (1)..(1869)
atgattacggcggcggacttctaccacgttatgacggctatggttccgttatacgtagctatgatcctcgcttacggctctgtcaaatggtggaaaatcttcacaccagaccaatgctccggcataaaccgtttcgtcgctctcttcgccgttcctctcctctctttccacttcatcgccgctaacaacccttacgccatgaacctccgtttcctcgccgcagattctctccagaaagtcattgtcctctctctcctcttcctctggtgcaaactcagccgcaacggttctttagattggaccataactctcttctctctctcgacactccccaacactctagtcatggggatacctcttctcaaaggcatgtatggtaatttctccggcgacctcatggttcaaatcgttgttcttcagtgtatcatttggtacacactcatgctctttctctttgagtaccgtggagctaagcttttgatctccgagcagtttccagacacagcaggatctattgtttcgattcatgttgattccgacattatgtctttagatggaagacaacctttggaaactgaagctgagattaaagaagatgggaagcttcatgttactgttcgtcgttctaatgcttcaaggtctgatatttactcgagaaggtctcaaggcttatctgcgacacctagaccttcgaatctaaccaacgctgagatatattcgcttcagagttcaagaaacccaacgccacgtggctctagttttaatcatactgatttttactcgatgatggcttctggtggtggtcggaactctaactttggtcctggagaagctgtgtttggttctaaaggtcctactccgagaccttccaactacgaagaagacggtggtcctgctaaaccgacggctgctggaactgctgctggagctgggaggtttcattatcaatctggaggaagtggtggcggtggaggagcgcattatccggcgccgaacccagggatgttttcgcccaacactggcggtggtggaggcacggcggcgaaaggaaacgctccggtggttggtgggaaaagacaagacggaaacggaagagatcttcacatgtttgtgtggagctcaagtgcttcgccggtctcagatgtgttcggcggtggaggaggaaaccaccacgccgattactccaccgctacgaacgatcatcaaaaggacgttaagatctctgtacctcaggggaatagtaacgacaaccagtacgtggagagggaagagtttagtttcggtaacaaagacgatgatagcaaagtattggcaacggacggtgggaacaacataagcaacaaaacgacgcaggctaaggtgatgccaccaacaagtgtgatgacaagactcattctcattatggtttggaggaaacttattcgtaatcccaactcttactccagtttattcggcatcacctggtccctcatttccttcaagtggaacattgaaatgccagctcttatagcaaagtctatctccatactctcagatgcaggtctaggcatggctatgttcagtcttgggttgttcatggcgttaaacccaagaataatagcttgtggaaacagaagagcagcttttgcggcggctatgagatttgtcgttggacctgccgtcatgctcgttgcttcttatgccgttggcctccgtggcgtcctcctccatgttgccattatccaggcagctttgccgcaaggaatagtaccgtttgtgtttgccaaagagtataatgtgcatcctgacattcttagcactgcggtgatatttgggatgttgatcgcgttgcccataactcttctctactacattctcttgggtctatga

SEQ ID NO: 122 - protein, 622 aa, Arabidopsis thaliana
MITAADFYHVMTAMVPLYVAMILAYGSVKWWKIFTPDQCSGINRFVALFAVPLLSFHFIAANNPYAMNLRFLAADSLQKVIVLSLLFLWCKLSRNGSLDWTITLFSLSTLPNTLVMGIPLLKGMYGNFSGDLMVQIVVLQCIIWYTLMLFLFEYRGAKLLISEQFPDTAGSIVSIHVDSDIMSLDGRQPLETEAEIKEDGKLHVTVRRSNASRSDIYSRRSQGLSATPRPSNLTNAEIYSLQSSRNPTPRGSSFNHTDFYSMMASGGGRNSNFGPGEAVFGSKGPTPRPSNYEEDGGPAKPTAAGTAAGAGRFHYQSGGSGGGGGAHYPAPNPGMFSPNTGGGGGTAAKGNAPVVGGKRQDGNGRDLHMFVWSSSASPVSDVFGGGGGNHHADYSTATNDHQKDVKISVPQGNSNDNQYVEREEFSFGNKDDDSKVLATDGGNNISNKTTQAKVMPPTSVMTRLILIMVWRKLIRNPNSYSSLFGITWSLISFKWNIEMPALIAKSISILSDAGLGMAMFSLGLFMALNPRIIACGNRRAAFAAAMRFVVGPAVMLVASYAVGLRGVLLHVAIIQAALPQGIVPFVFAKEYNVHPDILSTAVIFGMLIALPITLLYYILLGL

SEQ ID NO: 123 - protein, 10 aa, Unknown
  Conserved motif of a MTP in the biologically active portion
PLYVAMILAY

SEQ ID NO: 124 - protein, 18 aa, Unknown
  MISC_FEATURE (7)..(7): Conserved motif of a MTP in the biologically active portion; Xaa is valine, glycine, alanine, leucine, isoleucine, or proline
INRFVAXFAVPLLSFHFI

SEQ ID NO: 125 - protein, 17 aa, Unknown
  Conserved motif of a MTP in the biologically active portion
FSLSTLPNTLVMGIPLL

SEQ ID NO: 126 - DNA, 31 bp, Unknown
  AtAGR1 forward primer
ggggtcgaccaaaatgatcaccggcaaagac

SEQ ID NO: 127 - DNA, 33 bp, Unknown
  AtAGR1 reverse primer
gggttaattaacttaaagccccaaaagaacgta

SEQ ID NO: 128 - DNA, 20 bp, Unknown
  NOS terminator forward primer
tccccgatcgttcaaacatt

SEQ ID NO: 129 - DNA, 25 bp, Unknown
  NOS terminator reverse primer
ccatctcataaataacgtcatgcat
